(19) United States
(12) Patent Application Publication
(10) Pub. No.: US 2023/0257723 A1
(43) Pub. Date: Aug. 17, 2023

(54) CRISPR/CAS9 THERAPIES FOR CORRECTING DUCHENNE MUSCULAR DYSTROPHY BY TARGETED GENOMIC INTEGRATION

(71) Applicant: Duke University, Durham, NC (US)

(72) Inventors: Charles A. Gersbach, Chapel Hill, NC (US); Adrian Pickar Oliver, Rougemont, NC (US)

(21) Appl. No.: 17/921,316

(22) PCT Filed: Apr. 27, 2021
(86) PCT No.: PCT/US2021/029424

§ 371 Date: Oct. 25, 2022

Related U.S. Application Data
(60) Provisional application No. 63/016,282, filed on Apr. 27, 2020.
(60) Provisional application No. 63/160,551, filed on Mar. 12, 2021.

(51) Int. Cl. C12N 9/22; C12N 15/86; A61P 21/00

(52) U.S. Cl. CPC C12N 9/22; C12N 15/86; A61P 21/00; C12N 2310/20; C12N 2750/14143; C12N 2320/33

(57) ABSTRACT

Disclosed herein arm CRISPR/Cas-based genome editing compositions and methods for treating Duchenne Muscular Dystrophy by restoring dystrophin function. The CRISPR/Cas-based genome editing systems may include a guide RNA (gRNA) targeting a fragment of a mutant dystrophin gene, a Cas protein or a fusion protein comprising the Cas protein, and a donor sequence comprising a fragment of a wild-type dystrophin gene.

### CROSS-REFERENCE TO RELATED APPLICATIONS

[0001] This application claims priority to U.S. Provisional Patent Application No. 63/016,282, fled Apr. 27, 2020, and U.S. Provisional Patent Application No. 63/160,551, filed Mar. 12, 2021, each of which is incorporated herein by reference in its entirety.

### STATEMENT REGARDING FEDERALLY SPONSORED RESEARCH

[0002] This invention was made with government support under grant R01AR069085 awarded by the National Institutes of Health. The government has certain rights in the invention.

### FIELD

[0003] The present disclosure is directed to CRISPR/Cas-based genome editing compositions and methods for treating Duchenne Muscular Dystrophy by restoring dystrophin function.

### INTRODUCTION

[0004] Duchenne muscular dystrophy (DMD) is the most prevalent lethal heritable childhood disease occurring in ˜1:5000 newborn males. Progressive muscle weakness leading to mortality in patients' mid-20s is a result of mutations in the dystrophin gene. In most cases (˜60%), the mutations consist of deletions in one or more of the 79 exons from the dystrophin gene, leading to disruption of the reading frame. Previous therapeutic strategies typically aim to generate expression of a truncated but partially functional dystrophin protein that recapitulates a genotype corresponding to Becker muscular dystrophy, which is associated with milder symptoms relative to DMD. For example, several groups have adapted the CRISPR/Cas9 technology for gene editing in cultured human DMD cells and the mdx mouse model of DMD to restore the dystrophin reading frame by deleting specific exons. However, there remains a need to develop gene editing strategies to restore the complete, fully functional dystrophin protein.

### SUMMARY

[0005] In an aspect, the disclosure relates to a CRISPR/Cas-based genome editing system comprising one or more vectors encoding a composition, the composition comprising: (a) a guide RNA (gRNA) targeting a fragment of a mutant dystrophin gene, wherein the gRNA hybridizes to a target sequence within intron 51 or intron 44 of the mutant dystrophin gene; (b) a Cas protein or a fusion protein comprising the Cas protein; and (c) a donor sequence comprising a fragment of a wild-type dystrophin gene, wherein the donor sequence comprises exon 52 of the wild-type dystrophin gene.

[0006] In a further aspect, the disclosure relates to a CRISPR/Cas-based genome editing system comprising: (a) a guide RNA (gRNA) targeting a fragment of a mutant dystrophin gene, wherein the gRNA hybridizes to a target sequence within intron 51 or intron 44 of the mutant dystrophin gene; (b) a Cas protein or a fusion protein comprising the Cas protein; and (c) a donor sequence comprising a fragment of a wild-type dystrophin gene, wherein the donor sequence comprises exon 52 of the wild-type dystrophin gene.

[0007] Another aspect of the disclosure provides a CRISPR/Cas-based genome editing system comprising one or more vectors encoding a composition. The composition may include (a) a guide RNA (gRNA) targeting a fragment of a mutant dystrophin gene; (b) a Cas protein or a fusion protein comprising the Cas protein; and (c) a donor sequence comprising a fragment of a wild-type dystrophin gene.

[0008] Another aspect of the disclosure provides a CRISPR/Cas-based genome editing system. The system may include (a) a guide RNA (gRNA) targeting a fragment of a mutant dystrophin gene: (b) a Cas protein or a fusion protein comprising the Cas protein; and (c) a donor sequence comprising a fragment of a wild-type dystrophin gene.

[0009] In some embodiments, the gRNA hybridizes to a target sequence within intron 51 or intron 44 of the mutant dystrophin gene. In some embodiments, the gRNA hybridizes to a target sequence within the polynucleotide sequence of SEQ ID NO: 128 or SEQ ID NO: 156. In some embodiments, the donor sequence comprises exon 52 of the wild-type dystrophin gene. In some embodiments, donor sequence comprises the polynucleotide sequence of SEQ ID NO: 53. In some embodiments, the fragment of the wild-type dystrophin gene is flanked on both sides by a gRNA spacer and/or a PAM sequence. In some embodiments, the gRNA targets an intron that is between exon 51 and exon 52 of the mutant dystrophin gene. In some embodiments, the donor sequence comprises multiple exons of the wild-type dystrophin gene or a functional equivalent thereof.

[0010] In some embodiments, the donor sequence comprises one or more exons selected from exon 52, exon 53, exon 54, exon 55, exon 56, exon 57, exon 58, exon 59, exon 60, exon 61, exon 62, exon 63, exon 64, exon 65, exon 66, exon 67, exon 68, exon 69, exon 70, exon 71, exon 72, exon 73, exon 74, exon 75, exon 76, exon 77, exon 78, and exon 79 of the wild-type dystrophin gene or a functional equivalent thereof. In some embodiments, the donor sequence comprises exons 52-79 of the wild-type dystrophin gene or a functional equivalent thereof. In some embodiments, the donor sequence comprises exons 45-79 of the wild-type dystrophin gene or a functional equivalent thereof. In some embodiments, exon 52 of the mutant dystrophin gene is mutated or at least partially deleted from the dystrophin gene, or wherein exon 52 of the mutant dystrophin gene is deleted and the intron is juxtaposed to where the deleted exon 52 would be in a corresponding wild-type dystrophin gene. In some embodiments, the gRNA binds and targets a polynucleotide sequence comprising: (a) a sequence selected from SEQ ID NOs: 29-51, 87, 157-170; (b) a fragment of a sequence selected from SEQ ID NOs: 29-51, 87, 157-170; (c) a complement of a sequence selected from SEQ ID NOs: 29-51, 87, 157-170, or fragment thereof; (d) a nucleic acid that is substantially identical to a sequence selected from SEQ ID NOs: 29-51, 87, 157-170, or complement thereof; or (e) a nucleic acid that hybridizes under stringent conditions to a sequence selected from SEQ ID NOs: 29-51, 87, 157-170, complement thereof, or a sequence substantially identical thereto. In some embodiments, the gRNA binds and targets or is encoded by a polynucleotide sequence selected from SEQ ID NOs: 29-51, 87, 157-170, or a variant thereof. In some embodiments, the gRNA spacer comprises a sequence selected from SEQ ID NOs: 29-51, 87, 157-170. In some embodiments, the gRNA comprises a polynucleotide sequence selected from SEQ ID NOs: 64-86, 88, 171-184. In some embodiments, the gRNA binds or is encoded by a polynucleotide sequence selected from SEQ ID NOs: 35, 40, and 44, or the gRNA comprises a polynucleotide sequence selected from SEQ ID NOs: 70, 75, and 79. In some embodiments, the donor sequence comprises a polynucleotide sequence selected from SEQ ID NOs: 53-56, 154, and 155. In some embodiments, the donor sequence comprises a polynucleotide of SEQ ID NO: 55. In some embodiments, the donor sequence comprises a polynucleotide of SEQ ID NO: 56. In some embodiments, the Cas protein is a Streptococcus pyogenes Cas9 protein or a Staphylococcus aureus Cas9 protein. In some embodiments, the Cas protein comprises an amino acid sequence of SEQ ID NO: 18 or SEQ ID NO: 19. In some embodiments, the vector is a viral vector. In some embodiments, the vector is an Adeno-associated virus (AAV) vector. In some embodiments, the AAV vector is AAV1, AAV2, AAV3, AAV4, AAV5, AAV6, AAV7, AAV8, AAV9, AAV-10, AAV-11, AAV-12, AAV-13, or AAVrh.74 vector. In some embodiments, one of the one or more vectors comprises a polynucleotide sequence selected from SEQ ID NOs: 57-60 and 129-130. In some embodiments, the molar ratio between gRNA and donor sequence is 1:1, or 1:5, or from 5:1 to 1:10, or from 1:1 to 1:5.

[0011] Another aspect of the disclosure provides a recombinant polynucleotide encoding a donor sequence, wherein the donor sequence is flanked on both sides by a gRNA spacer and/or a PAM sequence. In some embodiments, the donor sequence comprises one or more exons selected from exon 52, exon 53, exon 54, exon 55, exon 56, exon 57, exon 58, exon 59, exon 60, exon 61, exon 62, exon 63, exon 64, exon 65, exon 66, exon 67, exon 68, exon 69, exon 70, exon 71, exon 72, exon 73, exon 74, exon 75, exon 76, exon 77, exon 78, and exon 79 of a dystrophin gene. In some embodiments, the dystrophin gene is a human dystrophin gene.

[0012] In some embodiments, the system results in a dystrophin gene that encodes an in-frame transcript comprising an exon 51 joined with an exon comprising a sequence of SEQ ID NO: 53 or SEQ ID NO: 55, and with an intron therebetween. In some embodiments, the donor sequence comprises a polynucleotide sequence comprising exons 52-79 of the human dystrophin gene. In some embodiments, the donor sequence comprises the polynucleotide sequence of SEQ ID NO: 55 or SEQ ID NO: 56. In some embodiments, the recombinant polynucleotide comprises a sequence selected from SEQ ID NOs: 57-60.

[0013] Another aspect of the disclosure provides a vector comprising a recombinant polynucleotide as detailed herein.

[0014] Another aspect of the disclosure provides a cell comprising a recombinant polynucleotide of as detailed herein or a vector as detailed herein.

[0015] Another aspect of the disclosure provides a composition for restoring dystrophin function in a cell having a mutant dystrophin gene, the composition comprising a system as detailed herein, a recombinant polynucleotide as detailed herein, or a vector as detailed herein.

[0016] Another aspect of the disclosure provides a kit comprising a system as detailed herein, a recombinant polynucleotide as detailed herein, or a vector as detailed herein, or a composition as detailed herein.

[0017] Another aspect of the disclosure provides a method for restoring dystrophin function in a cell or a subject having a mutant dystrophin gene. The method may include contacting the cell or the subject with a system as detailed herein, a recombinant polynucleotide as detailed herein, or a vector as detailed herein, or a composition as detailed herein. In some embodiments, the method results in a dystrophin gene that encodes an in-frame transcript comprising an exon 51 joined with an exon comprising a sequence of SEQ ID NO: 53 or SEQ ID NO: 55, and with an intron therebetween.

[0018] Another aspect of the disclosure provides a method for restoring dystrophin function in a cell or a subject having a disrupted dystrophin gene caused by one or more deleted or mutated exons. The method may include contacting the cell or the subject with a system as detailed herein, a recombinant polynucleotide as detailed herein, or a vector as detailed herein, or a composition as detailed herein. In some embodiments, the method results in a dystrophin gene that encodes an in-frame transcript comprising an exon 51 joined with an exon comprising a sequence of SEQ ID NO: 53 or SEQ ID NO: 55, and with an intron therebetween. In some embodiments, dystrophin function is restored by inserting one or more wild-type exons of dystrophin gene corresponding to the one or more deleted or mutated exons. In some embodiments, the subject is suffering from Duchenne Muscular Dystrophy.

[0019] Another aspect of the disclosure provides a genome editing system for correcting a dystrophin gene. The system may include a donor sequence comprising exons 52-79 or exons 45-79 of the wild-type dystrophin gene. In some embodiments, the genome editing system further includes a nuclease selected from homing endonuclease, zinc finger nuclease, TALEN, and Cas protein.

[0020] The disclosure provides for other aspects and embodiments that will be apparent in light of the following detailed description and accompanying figures.

### BRIEF DESCRIPTION OF THE DRAWINGS

[0021] FIG. 1 is a schematic diagram of the dystrophin protein.

[0022] FIG. 2 is a schematic diagram of the exons encoding the dystrophin protein and various interactions in the cell.

[0023] FIG. 3A, FIG. 3B, FIG. 3C, FIG. 3D, FIG. 3E show that HITI-mediated exon 52 insertion restores full-length dystrophin in humanized hDMDΔ52/mdx primary myofibers. (FIG. 3A) Schematic of dual AAV vector approach for HITI-based exon 52 integration and correction of hDMDΔ52 mutation. Orange pentagon, Cas9/gRNA target sequence. Orange triangle, Cas9 cleavage site with PAM. (FIG. 3B) Primary myoblasts were isolated from hDMDΔ52/mdx skeletal muscle, co-transduced with AAV2 vectors at 1:1 and 1:5 (Cas9:gRNA-donor) vector genome ratios, and differentiated into myofibers. (FIG. 3C) Validation of correct gene knock-in by genomic PCR. (FIG. 3D) Validation of correct donor mRNA splicing by cDNA PCR. (FIG. 3E) Western blot for dystrophin and Cas9 shows restoration of full-length dystrophin expression.

[0024] FIG. 4A, FIG. 4B, FIG. 4C, FIG. 4D, FIG. 4E, FIG. 4F, FIG. 4G, FIG. 4H, FIG. 4I, FIG. 4J show that AAV-CRISPR targeted exon 52 integration restores full-length dystrophin in hDMDΔ52/mdx mouse skeletal muscle. (FIG. 4A) Adult hDMDΔ52/mdx male mice were co-injected in TA muscles with AAV9 vectors at 1:1 and 1:5 (Cas9:gRNA-donor) vector genome ratios. (FIG. 4B) No significant differences in AAV viral genomes per diploid genomes (vg/dg) quantification in TA tissue between corresponding treatment groups. (FIG. 4C) Validation of correct gene knock-in in TA tissue by genomic PCR. Black triangle, detected intact AAV-donor integration. (FIG. 4D) Schematic of potential on-target genomic edits that resulted from targeted DNA cleavage. (FIG. 4E) Unbiased Tn5 tagmentation-based sequencing analysis of the various on-target genomic edits in TA tissues. (FIG. 4F) Unbiased Tn5 tagmentation-based sequencing quantification of total on-target genomic edits in TA tissues. (FIG. 4G) Validation of correct donor mRNA splicing in TA tissue by cDNA PCR. (FIG. 4H) Higher levels of corrected dystrophin transcripts in TA tissue for g7-Ex52 treated mice quantified by ddPCR. (FIG. 4I) Western blot for dystrophin and Cas9 expression shows restoration of dystrophin expression. (FIG. 4J) Dystrophin immunofluorescence staining shows a greater percentage of dystrophin positive fibers in g7-Ex52 treated mice (scale bar, 200 μm; each dot represents mean of 5 images per mouse). One-way ANOVA, followed by Tukey's post hoc multiple comparisons test (**P<0.01 and *P<0.05; mean±SEM; n=4 mice).

[0025] FIG. 5A, FIG. 5B, FIG. 5C, FIG. 5D, FIG. 5E, FIG. 5F show that HITI-mediated superexon insertion restores full-length dystrophin in humanized hDMDΔ52/mdx primary myofibers. (FIG. 5A) Schematic of dual AAV vector approach for HITI-based superexon integration and correction of hDMDΔ52 mutation. Pentagon (with black star), Cas9/gRNA target sequence. Triangle, Cas9 cleavage site with PAM. Black hexagon, stop codon. (FIG. 5B) Primary myoblasts were isolated from hDMDΔ52/mdx skeletal muscle, co-transduced with AAV2 vectors at 1:1 and 1:5 (Cas9:gRNA-donor) vector genome ratios, and differentiated into myofibers. (FIG. 5C) Validation of correct gene knock-in by genomic PCR. (FIG. 5D) Validation of correct donor mRNA splicing by cDNA PCR. (FIG. 5E) Characterization of Superexon-corrected polyA tail using 3′ RACE with genome-specific primer (GSP) for 3× stop. (FIG. 5F) Western blot for dystrophin and Cas9 shows restoration of dystrophin expression for Ex52 and superexon treated samples.

[0026] FIG. 6A, FIG. 6B, FIG. 6C, FIG. 6D, FIG. 6E, FIG. 6F show that AAV-CRISPR targeted superexon integration restores full-length dystrophin in hDMDΔ52/mdx mouse skeletal muscle. (FIG. 6A) Adult hDMDΔ52/mdx male mice were co-injected in TA muscles with AAV9 vectors at 1:1 and 1:5 (Cas9:gRNA-donor) vector genome ratios. (FIG. 6B) No significant differences in AAV vector genomes per diploid genomes (vg/dg) quantification in TA tissue between corresponding treatment groups. (FIG. 6C) Unbiased Tn5 tagmentation-based sequencing analysis of the various on-target genomic edits in TA tissues. (FIG. 6D) Quantification of corrected dystrophin transcripts in TA tissue by ddPCR. (FIG. 6E) Western blot for dystrophin and Cas9 shows restoration of dystrophin expression. (FIG. 6F) Dystrophin immunofluorescence staining shows a significant increase in the percentage of dystrophin positive fibers in g7-Ex52 treated mice compared to scrambled non-targeted donor control mice (scale bar, 200 μm; each dot represents mean of 5 images per mouse). One-way ANOVA, followed by Tukey's post hoc multiple comparisons test (**P<0.01 and *P<0.05; mean±SEM; n=6 mice).

[0027] FIG. 7A, FIG. 78, FIG. 7C, FIG. 7D, FIG. 7E, FIG. 7F, FIG. 7G, FIG. 7H show that systemic delivery of AAV-CRISPR targeted integration strategies restore full-length dystrophin in hDMDΔ52/mdx mouse cardiac muscle. (FIG. 7A) Systemic facial vein co-injection in P2 neonate hDMDΔ52/mdx male mice with AAV9 vectors at 1:1 and 1:5 (Cas9:gRNA-donor) vector genome ratios. (FIG. 7B) No significant differences in AAV vector genomes per diploid genomes (vg/dg) quantification in cardiac (heart) or skeletal (diaphragm and TA) tissue between corresponding treatment groups. (FIG. 7C) Unbiased Tn5 tagmentation-based sequencing analysis of the various on-target genomic edits shows corrected integration at levels above background in cardiac tissue. (FIG. 7D) Higher levels of corrected dystrophin transcripts in heart tissue for treated mice quantified by ddPCR. (FIG. 7E) Unbiased Tn5 tagmentation-based sequencing analysis of the various on-target heart cDNA shows diverse transcript outcomes including aberrant splicing. (FIG. 7F) Western blot for dystrophin and Cas9 shows restoration of dystrophin expression in heart tissue. (FIG. 7G) Dystrophin immunofluorescence staining in heart tissue shows detection of dystrophin positive fibers in all treated mice, with a significant increase in the percentage of dystrophin positive fibers in g7-superexon (1:1) treated mice compared to scrambled non-targeted donor control mice (scale bar, 200 μm; each dot represents mean of 5 images per mouse). (FIG. 7H) Serum creatine kinase levels show a decrease in hDMDΔ52/mdx treated mice compared to diseased hDMDΔ52/mdx scrambled non-targeted donor control mice. One-way ANOVA, followed by Tukey's post hoc multiple comparisons test (**P<0.01 and *P<0.05; mean t SEM; n=6 mice).

[0028] FIG. 8A, FIG. 8B, FIG. 8C, FIG. 8D show gRNA screening and validation of HITI-mediated integration. (FIG. 8A) Schematic of SaCas9 gRNAs targeting within intron 51 upstream of exon52 were designed with 21 nt spacers. (FIG. 8B) Indel formation by individual gRNAs co-transfected with SaCas9 plasmid in HEK293T cells was measured by Surveyor assay, which showed highest editing activity with g3, g6, and g7. (FIG. 8C) Indel formation by individual gRNAs cloned with 19-23nt spacers co-transfected with SaCas9 plasmid in DMD patient myoblasts was measured by Surveyor assay. (FIG. 8D) Electroporation of hDMDΔ52/mdx primary myoblasts with SaCas9 and gRNA AAV plasmids resulted in detection of gene knock-in by PCR and Sanger sequencing.

[0029] FIG. 9A, FIG. 9B show unbiased genomic DNA edit characterization of treated hDMDΔ52/mdx TA tissue. (FIG. 9A) Stacked total editing quantification of gDNA editing events in TA tissue from one PBS control and all treated hDMDΔ52/mdx mice using genome-specific primers (GSPs) that prime upstream of the respective gRNA target sites. (FIG. 9B) Editing quantification of corrected, indel, inverted integration, and AAV integration gDNA editing events in TA tissue from one PBS control and all treated hDMDΔ52/mdx mice.

[0030] FIG. 10 shows the genome-wide specificity analysis of the g7 gRNA. Identification of the top potential human off-target sites was measured by genome-wide in vitro genomic DNA digestion with g7 and CHANGE-seq analysis. Nucleotides that match the target site are indicated with a dots. Nucleotides that differ from the target are shown for each site. The read count, gRNA sequence (spacer and PAM), and the human genome (hg19) coordinates of the observed on-target and off-target sequences are provided.

[0031] FIG. 11A, FIG. 11B show unbiased genomic DNA edit characterization of treated hDMDΔ52/mdx TA tissue. (FIG. 11A) Stacked total editing quantification of gDNA editing events in TA tissue from treated hDMDΔ52/mdx mice. (FIG. 11B) Editing quantification of corrected, indel, inverted integration, and AAV integration gDNA editing events in TA tissue from all treated hDMDΔ52/mdx mice.

[0032] FIG. 12A, FIG. 12B show the unbiased genomic DNA edit characterization of treated hDMDΔ52/mdx mice following systemic injection. (FIG. 12A) Stacked total editing quantification of gDNA editing events in heart, diaphragm, and TA tissue from treated hDMDΔ52/mdx mice. (FIG. 12B) Combined editing quantification of corrected, indel, inverted integration, and AAV integration gDNA editing events in heart, diaphragm, and TA tissue from all treated hDMDΔ52/mdx mice.

[0033] FIG. 13A, FIG. 13B show the unbiased transcript edit characterization of treated hDMDΔ52/mdx cardiac tissue. (FIG. 13A) Quantification of transcript editing events in cardiac tissue from one non-targeted donor control and all treated hDMDΔ52/mdx mice. (FIG. 13B) Schematic of frequent SaCas9-containing transcript reads demonstrating on-target aberrant splicing with AAV-SaCas9 construct sequences and confirmed with corresponding cardiac genomic reads containing aligned Cas9-coding sequences.

[0034] FIG. 14 shows the nested quantification and representative immunofluorescence staining for full-length dystrophin restoration in cardiac tissue. For all dystrophin positive fiber quantification, 5 randomized images were taken for each mouse sample and human dystrophin-positive and total fibers (anti-laminin) were counted. A representative image of cardiac tissue is provided for each treated mouse. Nested quantification values were used for statistical analysis (scale bar, 200 μm; each dot represents mean a single quantification per mouse). One-way ANOVA, followed by Tukey's post hoc multiple comparisons test (*P<0.05; mean±SEM; n=6 mice).

### DETAILED DESCRIPTION

[0035] Described herein are CRISPR/Cas-based gene/genome editing compositions and methods for treating Duchenne Muscular Dystrophy (DMD) by restoring dystrophin function. DMD is typically caused by deletions in the dystrophin gene that disrupt the reading frame. Many strategies to treat DMD aim to restore the reading frame by removing or skipping over an additional exon, as it has been shown that an internally truncated dystrophin protein can still be partially functional. Detailed herein are AAV-based Homology-Independent Targeted Integration (HITI)-mediated gene editing therapies for correcting the dystrophin gene. Specifically, the CRISPR/Cas9 gene editing technology was adapted to direct the targeted insertion of missing exons into the dystrophin gene. As a therapeutically relevant target, HITI-mediated genome editing strategies were optimized in a humanized mouse model of DMD in which exon 52 has been removed in mice carrying the full-length human dystrophin gene (hDMDΔ52/mdx mice). To achieve targeted integration, an AAV vector containing the deleted genome sequence including exon 52, or in some cases exons 52-79, or in some cases exons 45-79, is co-delivered with an AAV vector encoding Cas9/gRNA expression cassettes to achieve full-length dystrophin restoration in skeletal and cardiac muscles. The AAV delivery system is used to express Cas9 and gRNAs to generate a targeted genomic DSB and to deliver donor templates for NHEJ-mediated integration at the cut site. Targeted integration of the exon(s) in cultured cells is confirmed. Combined with AAV delivery, HITI-mediated strategies for targeted insertion of missing exons provides a method to restore full-length dystrophin and improve functional outcomes.

### 1. DEFINITIONS

[0036] Unless otherwise defined, all technical and scientific terms used herein have the same meaning as commonly understood by one of ordinary skill in the art. In case of conflict, the present document, including definitions, will control. Preferred methods and materials are described below, although methods and materials similar or equivalent to those described herein can be used in practice or testing of the present invention. All publications, patent applications, patents and other references mentioned herein are incorporated by reference in their entirety. The materials, methods, and examples disclosed herein are illustrative only and not intended to be limiting.

[0037] The terms “comprise(s),” “include(s),” “having,” “has,” “can,” “contain(s),” and variants thereof, as used herein, are intended to be open-ended transitional phrases, terms, or words that do not preclude the possibility of additional acts or structures. The singular forms “a,” “and,” and “the” include plural references unless the context clearly dictates otherwise. The present disclosure also contemplates other embodiments “comprising,” “consisting of,” and “consisting essentially of,” the embodiments or elements presented herein, whether explicitly set forth or not.

[0038] For the recitation of numeric ranges herein, each intervening number there between with the same degree of precision is explicitly contemplated. For example, for the range of 6-9, the numbers 7 and 8 are contemplated in addition to 6 and 9, and for the range 6.0-7.0, the number 6.0, 6.1, 6.2, 6.3, 6.4, 6.5, 6.6, 6.7, 6.8, 6.9, and 7.0 are explicitly contemplated.

[0039] The term “about” or “approximately” as used herein as applied to one or more values of interest, refers to a value that is similar to a stated reference value, or within an acceptable error range for the particular value as determined by one of ordinary skill in the art, which will depend in part on how the value is measured or determined, such as the limitations of the measurement system. In certain aspects, the term “about” refers to a range of values that fall within 20%, 19%, 18%, 17%, 16%, 15%, 14%, 13%, 12%, 11%, 10%, 9%, 8%, 7%, 6%, 5%, 4%, 3%, 2%, 1%, or less in either direction (greater than or less than) of the stated reference value unless otherwise stated or otherwise evident from the context (except where such number would exceed 100% of a possible value). Alternatively, “about” can mean within 3 or more than 3 standard deviations, per the practice in the art. Alternatively, such as with respect to biological systems or processes, the term “about” can mean within an order of magnitude, preferably within 5-fold, and more preferably within 2-fold, of a value.

[0040] “Adeno-associated virus” or “AAV” as used interchangeably herein refers to a small virus belonging to the genus Dependovirus of the Parvoviridae family that infects humans and some other primate species. AAV is not currently known to cause disease and consequently the virus causes a very mild immune response.

[0041] “Amino acid” as used herein refers to naturally occurring and non-natural synthetic amino acids, as well as amino acid analogs and amino acid mimetics that function in a manner similar to the naturally occurring amino acids. Naturally occurring amino acids are those encoded by the genetic code. Amino acids can be referred to herein by either their commonly known three-letter symbols or by the one-letter symbols recommended by the IUPAC-IUB Biochemical Nomenclature Commission. Amino acids include the side chain and polypeptide backbone portions.

[0042] “Binding region” as used herein refers to the region within a target region that is recognized and bound by the CRISPR/Cas-based gene editing system.

[0043] “Clustered Regularly Interspaced Short Palindromic Repeats” and “CRISPRs”, as used interchangeably herein, refers to loci containing multiple short direct repeats that are found in the genomes of approximately 40% of sequenced bacteria and 90% of sequenced archaea.

[0044] “Coding sequence” or “encoding nucleic acid” as used herein means the nucleic acids (RNA or DNA molecule) that comprise a nucleotide sequence which encodes a protein. The coding sequence can further include initiation and termination signals operably linked to regulatory elements including a promoter and polyadenylation signal capable of directing expression in the cells of an individual or mammal to which the nucleic acid is administered. The coding sequence may be codon optimized.

[0045] “Complement” or “complementary” as used herein means a nucleic acid can mean Watson-Crick (e.g., A-T/U and C-G) or Hoogsteen base pairing between nucleotides or nucleotide analogs of nucleic acid molecules. “Complementarity” refers to a property shared between two nucleic acid sequences, such that when they are aligned antiparallel to each other, the nucleotide bases at each position will be complementary.

[0046] The terms “control,” “reference level,” and “reference” are used herein interchangeably. The reference level may be a predetermined value or range, which is employed as a benchmark against which to assess the measured result. “Control group” as used herein refers to a group of control subjects. The predetermined level may be a cutoff value from a control group. The predetermined level may be an average from a control group. Cutoff values (or predetermined cutoff values) may be determined by Adaptive Index Model (AIM) methodology. Cutoff values (or predetermined cutoff values) may be determined by a receiver operating curve (ROC) analysis from biological samples of the patient group. ROC analysis, as generally known in the biological arts, is a determination of the ability of a test to discriminate one condition from another, e.g., to determine the performance of each marker in identifying a patient having CRC. A description of ROC analysis is provided in P. J. Heagerty et al. (Biometrics 2000, 56, 337-44), the disclosure of which is hereby incorporated by reference in its entirety. Alternatively, cutoff values may be determined by a quartile analysis of biological samples of a patient group. For example, a cutoff value may be determined by selecting a value that corresponds to any value in the 25th-75th percentile range, preferably a value that corresponds to the 25th percentile, the 50th percentile or the 75th percentile, and more preferably the 75th percentile. Such statistical analyses may be performed using any method known in the art and can be implemented through any number of commercially available software packages (e.g., from Analyse-it Software Ltd., Leeds, UK; StataCorp LP, College Station, Tex.; SAS Institute Inc., Cary, N.C.). The healthy or normal levels or ranges for a target or for a protein activity may be defined in accordance with standard practice. A control may be a subject or cell without a composition as detailed herein. A control may be a subject, or a sample therefrom, whose disease state is known. The subject, or sample therefrom, may be healthy, diseased, diseased prior to treatment, diseased during treatment, or diseased after treatment, or a combination thereof.

[0047] “Correcting”, “gene editing,” and “restoring” as used herein refers to changing a mutant gene that encodes a dysfunctional protein or truncated protein or no protein at all, such that a full-length functional or partially full-length functional protein expression is obtained. Correcting or restoring a mutant gene may include replacing the region of the gene that has the mutation or replacing the entire mutant gene with a copy of the gene that does not have the mutation with a repair mechanism such as homology-directed repair (HDR). Correcting or restoring a mutant gene may also include repairing a frameshift mutation that causes a premature stop codon, an aberrant splice acceptor site or an aberrant splice donor site, by generating a double stranded break in the gene that is then repaired using non-homologous end joining (NHEJ). NHEJ may add or delete at least one base pair during repair which may restore the proper reading frame and eliminate the premature stop codon. Correcting or restoring a mutant gene may also include disrupting an aberrant splice acceptor site or splice donor sequence. Correcting or restoring a mutant gene may also include deleting a non-essential gene segment by the simultaneous action of two nucleases on the same DNA strand in order to restore the proper reading frame by removing the DNA between the two nuclease target sites and repairing the DNA break by NHEJ.

[0048] “Donor DNA”, “donor template,” and “repair template” as used interchangeably herein refers to a double-stranded DNA fragment or molecule that includes at least a portion of the gene of interest. The donor DNA may encode a full-functional protein or a partially functional protein.

[0049] “Duchenne Muscular Dystrophy” or “DMD” as used interchangeably herein refers to a recessive, fatal, X-linked disorder that results in muscle degeneration and eventual death. DMD is a common hereditary monogenic disease and occurs in 1 in 3500 males. DMD is the result of inherited or spontaneous mutations that cause nonsense or frame shift mutations in the dystrophin gene. The majority of dystrophin mutations that cause DMD are deletions of exons that disrupt the reading frame and cause premature translation termination in the dystrophin gene. DMD patients typically lose the ability to physically support themselves during childhood, become progressively weaker during the teenage years, and die in their twenties.

[0050] “Dystrophin” as used herein refers to a rod-shaped cytoplasmic protein which is a part of a protein complex that connects the cytoskeleton of a muscle fiber to the surrounding extracellular matrix through the cell membrane. Dystrophin provides structural stability to the dystroglycan complex of the cell membrane that is responsible for regulating muscle cell integrity and function. The dystrophin gene or “DMD gene” as used interchangeably herein is 2.2 megabases at locus Xp21. The primary transcription measures about 2,400 kb with the mature mRNA being about 14 kb. 79 exons code for the protein which is over 3500 amino acids.

[0051] “Enhancer” as used herein refers to non-coding DNA sequences containing multiple activator and repressor binding sites. Enhancers range from 200 bp to 1 kb in length and may be either proximal, 5′ upstream to the promoter or within the first intron of the regulated gene, or distal, in introns of neighboring genes or intergenic regions far away from the locus. Through DNA looping, active enhancers contact the promoter dependently of the core DNA binding motif promoter specificity. 4 to 5 enhancers may interact with a promoter. Similarly, enhancers may regulate more than one gene without linkage restriction and may “skip” neighboring genes to regulate more distant ones. Transcriptional regulation may involve elements located in a chromosome different to one where the promoter resides. Proximal enhancers or promoters of neighboring genes may serve as platforms to recruit more distal elements.

[0052] “Frameshift” or “frameshift mutation” as used interchangeably herein refers to a type of gene mutation wherein the addition or deletion of one or more nucleotides causes a shift in the reading frame of the codons in the mRNA. The shift in reading frame may lead to the alteration in the amino acid sequence at protein translation, such as a missense mutation or a premature stop codon.

[0053] “Functional” and “full-functional” as used herein describes protein that has biological activity. A “functional gene” refers to a gene transcribed to mRNA, which is translated to a functional protein.

[0054] “Fusion protein” as used herein refers to a chimeric protein created through the joining of two or more genes that originally coded for separate proteins. The translation of the fusion gene results in a single polypeptide with functional properties derived from each of the original proteins.

[0055] “Homology-directed repair” or “HDR” as used interchangeably herein refers to a mechanism in cells to repair double strand DNA lesions when a homologous piece of DNA is present in the nucleus, mostly in G2 and S phase of the cell cycle. HDR uses a donor DNA template to guide repair and may be used to create specific sequence changes to the genome, including the targeted addition of whole genes. If a donor template is provided along with the CRISPR/Cas9-based gene editing system, then the cellular machinery will repair the break by homologous recombination, which is enhanced several orders of magnitude in the presence of DNA cleavage. When the homologous DNA piece is absent, non-homologous end joining may take place instead.

[0056] “Genetic construct” as used herein refers to the DNA or RNA molecules that comprise a polynucleotide that encodes a protein. The coding sequence includes initiation and termination signals operably linked to regulatory elements including a promoter and polyadenylation signal capable of directing expression in the cells of the individual to whom the nucleic acid molecule is administered. As used herein, the term “expressible form” refers to gene constructs that contain the necessary regulatory elements operable linked to a coding sequence that encodes a protein such that when present in the cell of the individual, the coding sequence will be expressed.

[0057] “Genome editing” or “gene editing” as used herein refers to changing a gene. Genome editing may include correcting or restoring a mutant gene or adding additional mutations. Genome editing may include knocking out a gene, such as a mutant gene or a normal gene. Genome editing may be used to treat disease or, for example, enhance muscle repair, by changing the gene of interest. In some embodiments, the compositions and methods detailed herein are for use in somatic cells and not germ line cells.

[0058] The term “heterologous” as used herein refers to nucleic acid comprising two or more subsequences that are not found in the same relationship to each other in nature. For instance, a nucleic acid that is recombinantly produced typically has two or more sequences from unrelated genes synthetically arranged to make a new functional nucleic acid, for example, a promoter from one source and a coding region from another source. The two nucleic acids are thus heterologous to each other in this context. When added to a cell, the recombinant nucleic acids would also be heterologous to the endogenous genes of the cell. Thus, in a chromosome, a heterologous nucleic acid would include a non-native (non-naturally occurring) nucleic acid that has integrated into the chromosome, or a non-native (non-naturally occurring) extrachromosomal nucleic acid. Similarly, a heterologous protein indicates that the protein comprises two or more subsequences that are not found in the same relationship to each other in nature (for example, a “fusion protein,” where the two subsequences are encoded by a single nucleic acid sequence).

[0059] “Identical” or “identity” as used herein in the context of two or more polynucleotide or polypeptide sequences means that the sequences have a specified percentage of residues that are the same over a specified region. The percentage may be calculated by optimally aligning the two sequences, comparing the two sequences over the specified region, determining the number of positions at which the identical residue occurs in both sequences to yield the number of matched positions, dividing the number of matched positions by the total number of positions in the specified region, and multiplying the result by 100 to yield the percentage of sequence identity. In cases where the two sequences are of different lengths or the alignment produces one or more staggered ends and the specified region of comparison includes only a single sequence, the residues of single sequence are included in the denominator but not the numerator of the calculation. When comparing DNA and RNA, thymine (T) and uracil (U) may be considered equivalent. Identity may be performed manually or by using a computer sequence algorithm such as BLAST or BLAST 2.0.

[0060] “Mutant gene” or “mutated gene” as used interchangeably herein refers to a gene that has undergone a detectable mutation. A mutant gene has undergone a change, such as the loss, gain, or exchange of genetic material, which affects the normal transmission and expression of the gene. A “disrupted gene” as used herein refers to a mutant gene that has a mutation that causes a premature stop codon. The disrupted gene product is truncated relative to a full-length undisrupted gene product.

[0061] “Non-homologous end joining (NHEJ) pathway” as used herein refers to a pathway that repairs double-strand breaks in DNA by directly ligating the break ends without the need for a homologous template. The template-independent re-ligation of DNA ends by NHEJ is a stochastic, error-prone repair process that introduces random micro-insertions and micro-deletions (indels) at the DNA breakpoint. This method may be used to intentionally disrupt, delete, or alter the reading frame of targeted gene sequences. NHEJ typically uses short homologous DNA sequences called microhomologies to guide repair. These microhomologies are often present in single-stranded overhangs on the end of double-strand breaks. When the overhangs are perfectly compatible, NHEJ usually repairs the break accurately, yet imprecise repair leading to loss of nucleotides may also occur, but is much more common when the overhangs are not compatible.

[0062] “Normal gene” as used herein refers to a gene that has not undergone a change, such as a loss, gain, or exchange of genetic material. The normal gene undergoes normal gene transmission and gene expression. For example, a normal gene may be a wild-type gene.

[0063] “Nucleic acid” or “oligonucleotide” or “polynucleotide” as used herein means at least two nucleotides covalently linked together. The depiction of a single strand also defines the sequence of the complementary strand. Thus, a polynucleotide also encompasses the complementary strand of a depicted single strand. Many variants of a polynucleotide may be used for the same purpose as a given polynucleotide. Thus, a polynucleotide also encompasses substantially identical polynucleotides and complements thereof. A single strand provides a probe that may hybridize to a target sequence under stringent hybridization conditions. Thus, a polynucleotide also encompasses a probe that hybridizes under stringent hybridization conditions. Polynucleotides may be single stranded or double stranded or may contain portions of both double stranded and single stranded sequence. The polynucleotide can be nucleic acid, natural or synthetic, DNA, genomic DNA, cDNA, RNA, or a hybrid, where the polynucleotide can contain combinations of deoxyribo- and ribo-nucleotides, and combinations of bases including, for example, uracil, adenine, thymine, cytosine, guanine, inosine, xanthine hypoxanthine, isocytosine, and isoguanine. Polynucleotides can be obtained by chemical synthesis methods or by recombinant methods.

[0064] “Open reading frame” refers to a stretch of codons that begins with a start codon and ends at a stop codon. In eukaryotic genes with multiple exons, introns are removed, and exons are then joined together after transcription to yield the final mRNA for protein translation. An open reading frame may be a continuous stretch of codons. In some embodiments, the open reading frame only applies to spliced mRNAs, not genomic DNA, for expression of a protein.

[0065] “Operably linked” as used herein means that expression of a gene is under the control of a promoter with which it is spatially connected. A promoter may be positioned 5′ (upstream) or 3′ (downstream) of a gene under its control. The distance between the promoter and a gene may be approximately the same as the distance between that promoter and the gene it controls in the gene from which the promoter is derived. As is known in the art, variation in this distance may be accommodated without loss of promoter function. Nucleic acid or amino acid sequences are “operably linked” (or “operatively linked”) when placed into a functional relationship with one another. For instance, a promoter or enhancer is operably linked to a coding sequence if it regulates, or contributes to the modulation of, the transcription of the coding sequence. Operably linked DNA sequences are typically contiguous, and operably linked amino acid sequences are typically contiguous and in the same reading frame. However, since enhancers generally function when separated from the promoter by up to several kilobases or more and intronic sequences may be of variable lengths, some polynucleotide elements may be operably linked but not contiguous. Similarly, certain amino acid sequences that are non-contiguous in a primary polypeptide sequence may nonetheless be operably linked due to, for example folding of a polypeptide chain. With respect to fusion polypeptides, the terms “operatively linked” and “operably linked” can refer to the fact that each of the components performs the same function in linkage to the other component as it would if it were not so linked.

[0066] “Partially-functional” as used herein describes a protein that is encoded by a mutant gene and has less biological activity than a functional protein but more than a non-functional protein.

[0067] A “peptide” or “polypeptide” is a linked sequence of two or more amino acids linked by peptide bonds. The polypeptide can be natural, synthetic, or a modification or combination of natural and synthetic. Peptides and polypeptides include proteins such as binding proteins, receptors, and antibodies. The terms “polypeptide”, “protein,” and “peptide” are used interchangeably herein. “Primary structure” refers to the amino acid sequence of a particular peptide. “Secondary structure” refers to locally ordered, three dimensional structures within a polypeptide. These structures are commonly known as domains, for example, enzymatic domains, extracellular domains, transmembrane domains, pore domains, and cytoplasmic tail domains. “Domains” are portions of a polypeptide that form a compact unit of the polypeptide and are typically 15 to 350 amino acids long. Exemplary domains include domains with enzymatic activity or ligand binding activity. Typical domains are made up of sections of lesser organization such as stretches of beta-sheet and alpha-helices. “Tertiary structure” refers to the complete three-dimensional structure of a polypeptide monomer. “Quaternary structure” refers to the three-dimensional structure formed by the noncovalent association of independent tertiary units. A “motif” is a portion of a polypeptide sequence and includes at least two amino acids. A motif may be 2 to 20, 2 to 15, or 2 to 10 amino acids in length. In some embodiments, a motif includes 3, 4, 5, 6, or 7 sequential amino acids. A domain may be comprised of a series of the same type of motif.

[0068] “Premature stop codon” or “out-of-frame stop codon” as used interchangeably herein refers to nonsense mutation in a sequence of DNA, which results in a stop codon at location not normally found in the wild-type gene. A premature stop codon may cause a protein to be truncated or shorter compared to the full-length version of the protein.

[0069] “Promoter” as used herein means a synthetic or naturally derived molecule which is capable of conferring, activating or enhancing expression of a nucleic acid in a cell. A promoter may comprise one or more specific transcriptional regulatory sequences to further enhance expression and/or to alter the spatial expression and/or temporal expression of same. A promoter may also comprise distal enhancer or repressor elements, which may be located as much as several thousand base pairs from the start site of transcription. A promoter may be derived from sources including viral, bacterial, fungal, plants, insects, and animals. A promoter may regulate the expression of a gene component constitutively, or differentially with respect to cell, the tissue or organ in which expression occurs or, with respect to the developmental stage at which expression occurs, or in response to external stimuli such as physiological stresses, pathogens, metal ions, or inducing agents. Representative examples of promoters include the bacteriophage T7 promoter, bacteriophage T3 promoter, SP6 promoter, lac operator-promoter, tac promoter, SV40 late promoter, SV40 early promoter, RSV-LTR promoter, CMV IE promoter, SV40 early promoter or SV40 late promoter, human U6 (hU6) promoter, and CMV IE promoter. Promoters that target muscle-specific stem cells may include, for example, the CK8 promoter, the Spc5-12 promoter, and the MHCK7 promoter.

[0070] The term “recombinant” when used with reference to, for example, a cell, nucleic acid, protein, or vector, indicates that the cell, nucleic acid, protein, or vector, has been modified by the introduction of a heterologous nucleic acid or protein or the alteration of a native nucleic acid or protein, or that the cell is derived from a cell so modified. Thus, for example, recombinant cells express genes that are not found within the native (naturally occurring) form of the cell or express a second copy of a native gene that is otherwise normally or abnormally expressed, under expressed, or not expressed at all.

[0071] “Sample” or “test sample” as used herein can mean any sample in which the presence and/or level of a target is to be detected or determined or any sample comprising a DNA targeting or gene editing system or component thereof as detailed herein. Samples may include liquids, solutions, emulsions, or suspensions. Samples may include a medical sample. Samples may include any biological fluid or tissue, such as blood, whole blood, fractions of blood such as plasma and serum, muscle, interstitial fluid, sweat, saliva, urine, tears, synovial fluid, bone marrow, cerebrospinal fluid, nasal secretions, sputum, amniotic fluid, bronchoalveolar lavage fluid, gastric lavage, emesis, fecal matter, lung tissue, peripheral blood mononuclear cells, total white blood cells, lymph node cells, spleen cells, tonsil cells, cancer cells, tumor cells, bile, digestive fluid, skin, or combinations thereof. In some embodiments, the sample comprises an aliquot. In other embodiments, the sample comprises a biological fluid. Samples can be obtained by any means known in the art. The sample can be used directly as obtained from a patient or can be pre-treated, such as by filtration, distillation, extraction, concentration, centrifugation, inactivation of interfering components, addition of reagents, and the like, to modify the character of the sample in some manner as discussed herein or otherwise as is known in the art.

[0072] “Subject” and “patient” as used herein interchangeably refers to any vertebrate, including, but not limited to, a mammal that wants or is in need of the herein described compositions or methods. The subject may be a human or a non-human. The subject may be a vertebrate. The subject may be a mammal. The mammal may be a primate or a non-primate. The mammal can be a non-primate such as, for example, cow, pig, camel, llama, hedgehog, anteater, platypus, elephant, alpaca, horse, goat, rabbit, sheep, hamsters, guinea pig, cat, dog, rat, and mouse. The mammal can be a primate such as a human. The mammal can be a non-human primate such as, for example, monkey, cynomolgous monkey, rhesus monkey, chimpanzee, gorilla, orangutan, and gibbon. The subject may be of any age or stage of development, such as, for example, an adult, an adolescent, or an infant. The subject may be male. The subject may be female. In some embodiments, the subject has a specific genetic marker. The subject may be undergoing other forms of treatment.

[0073] “Substantially identical” can mean that a first and second amino acid or polynucleotide sequence are at least 60%, 65%, 70%, 75%, 80%, 85%, 90%, 95%, 96%, 97%, 98%, or 99% over a region of 1, 2, 3, 4, 5, 6, 7, 8, 9, 10, 11, 12, 13, 14, 15, 16, 17, 18, 19, 20, 21, 22, 23, 24, 25, 30, 35, 40, 45, 50, 55, 60, 65, 70, 75, 80, 85, 90, 95, 100, 200, 300, 400, 500, 600, 700, 800, 900, 1000, 1100 amino acids or nucleotides, respectively.

[0074] “Target gene” as used herein refers to any nucleotide sequence encoding a known or putative gene product. The target gene may be a mutated gene involved in a genetic disease. The target gene may encode a known or putative gene product that is intended to be corrected or for which its expression is intended to be modulated. In certain embodiments, the target gene is the dystrophin gene or a portion thereof.

[0075] “Target region” as used herein refers to the region of the target gene to which the CRISPR/Cas9-based gene editing or targeting system is designed to bind.

[0076] “Transgene” as used herein refers to a gene or genetic material containing a gene sequence that has been isolated from one organism and is introduced into a different organism. This non-native segment of DNA may retain the ability to produce RNA or protein in the transgenic organism, or it may alter the normal function of the transgenic organism's genetic code. The introduction of a transgene has the potential to change the phenotype of an organism.

[0077] Transcriptional regulatory elements” or “regulatory elements” refers to a genetic element which can control the expression of nucleic acid sequences, such as activate, enhancer, or decrease expression, or alter the spatial and/or temporal expression of a nucleic acid sequence. Examples of regulatory elements include, for example, promoters, enhancers, splicing signals, polyadenylation signals, and termination signals. A regulatory element can be “endogenous,” “exogenous,” or “heterologous” with respect to the gene to which it is operably linked. An “endogenous” regulatory element is one which is naturally linked with a given gene in the genome. An “exogenous” or “heterologous” regulatory element is one which is not normally linked with a given gene but is placed in operable linkage with a gene by genetic manipulation.

[0078] “Treatment” or “treating” or “treatment” when referring to protection of a subject from a disease, means suppressing, repressing, reversing, alleviating, ameliorating, or inhibiting the progress of disease, or completely eliminating a disease. A treatment may be either performed in an acute or chronic way. The term also refers to reducing the severity of a disease or symptoms associated with such disease prior to affliction with the disease. Preventing the disease involves administering a composition of the present invention to a subject prior to onset of the disease. Suppressing the disease involves administering a composition of the present invention to a subject after induction of the disease but before its clinical appearance. Repressing or ameliorating the disease involves administering a composition of the present invention to a subject after clinical appearance of the disease. As used herein, the term “gene therapy” refers to a method of treating a patient wherein polypeptides or nucleic acid sequences are transferred into cells of a patient such that activity and/or the expression of a particular gene is modulated. In certain embodiments, the expression of the gene is suppressed. In certain embodiments, the expression of the gene is enhanced. In certain embodiments, the temporal or spatial pattern of the expression of the gene is modulated.

[0079] “Variant” used herein with respect to a polynucleotide means (i) a portion or fragment of a referenced nucleotide sequence; (ii) the complement of a referenced nucleotide sequence or portion thereof; (iii) a nucleic acid that is substantially identical to a referenced nucleic acid or the complement thereof; or (iv) a nucleic acid that hybridizes under stringent conditions to the referenced nucleic acid, complement thereof, or a sequences substantially identical thereto.

[0080] “Variant” with respect to a peptide or polypeptide that differs in amino acid sequence by the insertion, deletion, or conservative substitution of amino acids, but retain at least one biological activity. Variant may also mean a protein with an amino acid sequence that is substantially identical to a referenced protein with an amino acid sequence that retains at least one biological activity. Representative examples of “biological activity” include the ability to be bound by a specific antibody or polypeptide or to promote an immune response. Variant can mean a functional fragment thereof. Variant can also mean multiple copies of a polypeptide. The multiple copies can be in tandem or separated by a linker. A conservative substitution of an amino acid, for example, replacing an amino acid with a different amino acid of similar properties (for example, hydrophilicity, degree and distribution of charged regions) is recognized in the art as typically involving a minor change. These minor changes may be identified, in part, by considering the hydropathic index of amino acids, as understood in the art (Kyte et al., J. Mol. Biol. 1982, 157, 105-132). The hydropathic index of an amino acid is based on a consideration of its hydrophobicity and charge. It is known in the art that amino acids of similar hydropathic indexes may be substituted and still retain protein function. In one aspect, amino acids having hydropathic indexes of ±2 are substituted. The hydrophilicity of amino acids may also be used to reveal substitutions that would result in proteins retaining biological function. A consideration of the hydrophilicity of amino acids in the context of a peptide permits calculation of the greatest local average hydrophilicity of that peptide. Substitutions may be performed with amino acids having hydrophilicity values within ±2 of each other. Both the hydrophobicity index and the hydrophilicity value of amino acids are influenced by the particular side chain of that amino acid. Consistent with that observation, amino acid substitutions that are compatible with biological function are understood to depend on the relative similarity of the amino acids, and particularly the side chains of those amino acids, as revealed by the hydrophobicity, hydrophilicity, charge, size, and other properties.

[0081] “Vector” as used herein means a nucleic acid sequence containing an origin of replication. A vector may be a viral vector, bacteriophage, bacterial artificial chromosome, or yeast artificial chromosome. A vector may be a DNA or RNA vector. A vector may be a self-replicating extrachromosomal vector, and preferably, is a DNA plasmid. For example, the vector may encode a Cas9 protein and at least one gRNA molecule.

[0082] Unless otherwise defined herein, scientific and technical terms used in connection with the present disclosure shall have the meanings that are commonly understood by those of ordinary skill in the art. For example, any nomenclatures used in connection with, and techniques of, cell and tissue culture, molecular biology, immunology, microbiology, genetics, and protein and nucleic acid chemistry and hybridization described herein are those that are well known and commonly used in the art. The meaning and scope of the terms should be clear; in the event however of any latent ambiguity, definitions provided herein take precedent over any dictionary or extrinsic definition. Further, unless otherwise required by context, singular terms shall include pluralities and plural terms shall include the singular.

### 2. DYSTROPHIN

[0083] Dystrophin is a rod-shaped cytoplasmic protein and a part of a protein complex that connects the cytoskeleton of a muscle fiber to the surrounding extracellular matrix through the cell membrane (FIG. 1). Dystrophin provides structural stability to the dystroglycan complex of the cell membrane. The dystrophin gene is 2.2 megabases at locus Xp21. The primary transcription measures about 2,400 kb with the mature mRNA being about 14 kb. 79 exons include approximately 2.2 million nucleotides and code for the protein, which is over 3500 amino acids (FIG. 2). The large size of the dystrophin gene as well as its repetitive elements make the gene susceptible to recombination, leading to deletions of one or more exons. Normal skeleton muscle tissue contains only small amounts of dystrophin, but its absence of abnormal expression leads to the development of severe and incurable symptoms. Some mutations in the dystrophin gene lead to the production of defective dystrophin and severe dystrophic phenotype in affected patients. Some mutations in the dystrophin gene lead to partially-functional dystrophin protein and a much milder dystrophic phenotype in affected patients.

[0084] DMD is the result of inherited or spontaneous mutations that cause nonsense or frame shift mutations in the dystrophin gene. DMD is the most prevalent lethal heritable childhood disease and affects approximately one in 5,000 newborn males. DMD is characterized by progressive muscle weakness, often leading to mortality in subjects at age mid-twenties, due to the lack of a functional dystrophin gene. Most mutations are deletions in the dystrophin gene that disrupt the reading frame. Naturally occurring mutations and their consequences are relatively well understood for DMD. In-frame deletions that occur in the exon 45-55 regions contained within the rod domain can produce highly functional dystrophin proteins, and many carriers are asymptomatic or display mild symptoms. Exons 45-55 of dystrophin are a mutational hotspot. Furthermore, more than 60% of patients may be treated by targeting exons in this region of the dystrophin gene. Efforts have been made to restore the disrupted dystrophin reading frame in DMD patients by skipping non-essential exon(s) (for example, exon 45 skipping) during mRNA splicing to produce internally deleted but functional dystrophin proteins. One therapeutic aim may be to generate expression of a truncated, but partially functional, dystrophin protein that is similar to the product of the DMD gene in Becker muscular dystrophy (BMD) that is associated with milder symptoms relative to DMD. The deletion of internal dystrophin exon(s) (for example, deletion of exon 45) may retain the proper reading frame and can generate an internally truncated but partially functional dystrophin protein. Deletions between exons 45-55 of dystrophin can result in a phenotype that is much milder compared to DMD.

[0085] A dystrophin gene may be a mutant dystrophin gene. A dystrophin gene may be a wild-type dystrophin gene. A dystrophin gene may have a sequence that is functionally identical to a wild-type dystrophin gene, for example, the sequence may be codon-optimized but still encode for the same protein as the wild-type dystrophin. A mutant dystrophin gene may include one or more mutations relative to the wild-type dystrophin gene. Mutations may include, for example, nucleotide deletions, substitutions, additions, transversions, or combinations thereof. Mutations may be in one or more exons and/or introns. Mutations may include deletions of all or parts of at least one intron and/or exon. An exon of a mutant dystrophin gene may be mutated or at least partially deleted from the dystrophin gene. An exon of a mutant dystrophin gene may be fully deleted. A mutant dystrophin gene may have a portion or fragment thereof that corresponds to the corresponding sequence in the wild-type dystrophin gene. In some embodiments, a disrupted dystrophin gene caused by a deleted or mutated exon can be restored in DMD patients by adding back the corresponding wild-type exon. In some embodiments, disrupted dystrophin caused by, for example, a deleted or mutated exon 52, can be restored in DMD patients by adding back in wild-type exon 52. In certain embodiments, exon 52 of a dystrophin gene refers to the 52nd exon of the dystrophin gene. Exon 52 is frequently adjacent to frame-disrupting deletions in DMD patients. Addition of exon 52 to restore the reading frame may ameliorate the phenotype in DMD subjects, including DMD subjects with deletion mutations. In certain embodiments, one or more exons may be added and inserted into the disrupted dystrophin gene. The one or more exons may be added and inserted so as to restore the corresponding mutated or deleted exon(s) in dystrophin. The one or more exons may be added and inserted into the disrupted dystrophin gene in addition to adding back and inserting the exon 52. In some embodiments, the one or more exons added and inserted into the disrupted dystrophin gene include exons 52-79. In some embodiments, the one or more exons added and inserted into the disrupted dystrophin gene include exons 45-79.

### 3. CRISPR/CAS9-BASED GENE EDITING SYSTEM

[0086] The compositions and methods detailed herein may be suitable for any gene editing system or tool wherein two targeting nucleases are combined to create a deletion in a genome. Gene editing systems may include, for example, those comprising homing endonucleases, zinc finger nucleases (ZFNs), transcription activator-like effector (TALE) nucleases (TALENs), and clustered regularly interspaced short palindromic repeats (CRISPR)-CRISPR-associated protein (Cas protein) such as Cas9. Homing endonucleases generally cleave their DNA substrates as dimers and do not have distinct binding and cleavage domains. ZFNs recognize target sites that consist of two zinc-finger binding sites that flank a 5- to 7-base pair (bp) spacer sequence recognized by the FokI cleavage domain. TALENs recognize target sites that consist of two TALE DNA-binding sites that flank a 12- to 20-bp spacer sequence recognized by the FokI cleavage domain. In some embodiments, the compositions and methods detailed herein may be used with CRISPR/Cas9-based gene editing systems. Provided herein are CRISPR/Cas9-based gene editing systems. The CRISPR/Cas9-based gene editing system may be used to restore dystrophin gene function. The CRISPR/Cas9-based gene editing system may include a Cas9 protein or a fusion protein, and at least one gRNA.

[0087] “Clustered Regularly Interspaced Short Palindromic Repeats” and “CRISPRs,” as used interchangeably herein, refers to loci containing multiple short direct repeats that are found in the genomes of approximately 40% of sequenced bacteria and 90% of sequenced archaea. The CRISPR system is a microbial nuclease system involved in defense against invading phages and plasmids that provides a form of acquired immunity. The CRISPR loci in microbial hosts contain a combination of CRISPR-associated (Cas) genes as well as non-coding RNA elements capable of programming the specificity of the CRISPR-mediated nucleic acid cleavage. Short segments of foreign DNA, called spacers, are incorporated into the genome between CRISPR repeats, and serve as a “memory” of past exposures. Cas9 forms a complex with the 3′ end of a sgRNA (which may be referred interchangeably herein as “gRNA”), and the protein-RNA pair recognizes its genomic target by complementary base pairing between the 5′ end of the sgRNA sequence and a predefined 20 bp DNA sequence, known as the protospacer. This complex is directed to homologous loci of pathogen DNA via regions encoded within the crRNA, i.e., the protospacers, and protospacer-adjacent motifs (PAMs) within the pathogen genome. The non-coding CRISPR array is transcribed and cleaved within direct repeats into short crRNAs containing individual spacer sequences, which direct Cas nucleases to the target site (protospacer). By simply exchanging the 20 bp recognition sequence of the expressed sgRNA, the Cas9 nuclease can be directed to new genomic targets. CRISPR spacers are used to recognize and silence exogenous genetic elements in a manner analogous to RNAi in eukaryotic organisms.

[0088] Three classes of CRISPR systems (Types I, II, and III effector systems) are known. The Type II effector system carries out targeted DNA double-strand break in four sequential steps, using a single effector enzyme, Cas9, to cleave dsDNA. Compared to the Type I and Type III effector systems, which require multiple distinct effectors acting as a complex, the Type II effector system may function in alternative contexts such as eukaryotic cells. The Type II effector system consists of a long pre-crRNA, which is transcribed from the spacer-containing CRISPR locus, the Cas9 protein, and a tracrRNA, which is involved in pre-crRNA processing. The tracrRNAs hybridize to the repeat regions separating the spacers of the pre-crRNA, thus initiating dsRNA cleavage by endogenous RNase Ill. This cleavage is followed by a second cleavage event within each spacer by Cas9, producing mature crRNAs that remain associated with the tracrRNA and Cas9, forming a Cas9:crRNA-tracrRNA complex.

[0089] The Cas9:crRNA-tracrRNA complex unwinds the DNA duplex and searches for sequences matching the crRNA to cleave. Target recognition occurs upon detection of complementarity between a “protospacer” sequence in the target DNA and the remaining spacer sequence in the crRNA. Cas9 mediates cleavage of target DNA if a correct protospacer-adjacent motif (PAM) is also present at the 3′ end of the protospacer. For protospacer targeting, the sequence must be immediately followed by the protospacer-adjacent motif (PAM), a short sequence recognized by the Cas9 nuclease that is required for DNA cleavage. Different Type II systems have differing PAM requirements.

[0090] An engineered form of the Type II effector system of S. pyogenes was shown to function in human cells for genome engineering. In this system, the Cas9 protein was directed to genomic target sites by a synthetically reconstituted “guide RNA” (“gRNA”, also used interchangeably herein as a chimeric single guide RNA (“sgRNA”)), which is a crRNA-tracrRNA fusion that obviates the need for RNase III and crRNA processing in general. Provided herein are CRISPR/Cas9-based engineered systems for use in gene editing and treating genetic diseases. The CRISPR/Cas9-based engineered systems can be designed to target any gene, including genes involved in, for example, a genetic disease, aging, tissue regeneration, or wound healing. The CRISPR/Cas9-based gene editing system can include a Cas9 protein or a Cas9 fusion protein.

[0091] a. Cas9 Protein

[0092] Cas9 protein is an endonuclease that cleaves nucleic acid and is encoded by the CRISPR loci and is involved in the Type II CRISPR system. The Cas9 protein can be from any bacterial or archaea species, including, but not limited to, Streptococcus pyogenes, Staphylococcus aureus (S. aureus), Acidovorax avenae, Actinobacillus pleuropneumoniae, Actinobacillus succinogenes, Actinobacillus suis, Actinomyces sp., cycliphilus denitrificans, Aminomonas paucivorans, Bacillus cereus, Bacillus smithii, Bacillus thuringiensis, Bacteroides sp., Blastopirellula manina, Bradyrhizobium sp., Brevibacillus laterosporus, Campylobacter coli, Campylobacter jejuni, Campylobacter lari, candidatus punicei spirillum, Clostridium cellulolyticum, Clostridium perfringens, Corynebacterium accolens, Corynebacterium diphtheria, Corynebacterium matruchotii, Dinoroseobacter shibae, Eubacterium dolichum, gamma proteobacterium, Gluconacetobacter diazotrophicus, Haemophilus parainfluenzae, Haemophilus sputorum, Helicobacter canadensis, Helicobacter cinaedi, Helicobacter mustelae, Ilyobacter polytropus, Kingella kingae, Lactobacillus crispatus, Listeria ivanovii, Listeria monocytogenes, Listeriaceae bacterium, Methylocystis sp., Methylosinus trichosporium, Mobiluncus mulieris, Neisseria bacilliformis, Neisseria cinerea, Neisseria flavescens, Neisseria lactamica, Neisseria sp., Neisseria wadsworthii, Nitrosomonas sp., Parvibaculum lavamentivorans, Pasteurella multocida, Phascolarctobacterium succinatutens, Ralstonia syzygii, Rhodopseudomonas palustris, Rhodovulum sp., Simonsiella muelleri, Sphingomonas sp., Sporolactobacillus vineae, Staphylococcus lugdunensis, Streptococcus sp., Subdoligranulum sp., Tistrella mobilis, Treponema sp., or Verminephrobacter eiseniae. In certain embodiments, the Cas9 molecule is a Streptococcus pyogenes Cas9 molecule (also referred herein as “SpCas9”). SpCas9 may comprise an amino acid sequence of SEQ ID NO: 18. In certain embodiments, the Cas9 molecule is a Staphylococcus aureus Cas9 molecule (also referred herein as “SaCas9”). SaCas9 may comprise an amino acid sequence of SEQ ID NO: 19.

[0093] A Cas9 molecule or a Cas9 fusion protein can interact with one or more gRNA molecule(s) and, in concert with the gRNA molecule(s), can localize to a site that comprises a target domain, and in certain embodiments, a PAM sequence. The Cas9 protein forms a complex with the 3′ end of a gRNA. The ability of a Cas9 molecule or a Cas9 fusion protein to recognize a PAM sequence can be determined, for example, by using a transformation assay as known in the art.

[0094] The specificity of the CRISPR-based system may depend on two factors: the target sequence and the protospacer-adjacent motif (PAM). The targeting sequence is located on the 5′ end of the gRNA and is designed to bond with base pairs on the host DNA at the correct DNA sequence known as the protospacer or target sequence. By simply exchanging the recognition sequence of the gRNA, the Cas9 protein can be directed to new genomic targets. The PAM sequence is located on the DNA to be altered and is recognized by a Cas9 protein. PAM recognition sequences of the Cas9 protein can be species specific.

[0095] In certain embodiments, the ability of a Cas9 molecule or a Cas9 fusion protein to interact with and cleave a target nucleic acid is PAM sequence dependent. A PAM sequence is a sequence in the target nucleic acid. In certain embodiments, cleavage of the target nucleic acid occurs upstream from the PAM sequence. Cas9 molecules from different bacterial species can recognize different sequence motifs (for example, PAM sequences). A Cas9 molecule of S. pyogenes may recognize the PAM sequence of NRG (5′-NRG-3′, where R is any nucleotide residue, and in some embodiments, R is either A or G, SEQ ID NO: 1). In certain embodiments, a Cas9 molecule of S. pyogenes may naturally prefer and recognize the sequence motif NGG (SEQ ID NO: 2) and direct cleavage of a target nucleic acid sequence 1 to 10, for example, 3 to 5, bp upstream from that sequence. In some embodiments, a Cas9 molecule of S. pyogenes accepts other PAM sequences, such as NAG (SEQ ID NO: 3) in engineered systems (Hsu et al., Nature Biotechnology 2013 doi:10.1038/nbt.2647). In certain embodiments, a Cas9 molecule of S. thermophilus recognizes the sequence motif NGGNG (SEQ ID NO: 4) and/or NNAGAAW (W=A or T) (SEQ ID NO: 5) and directs cleavage of a target nucleic acid sequence 1 to 10, for example, 3 to 5, bp upstream from these sequences. In certain embodiments, a Cas9 molecule of S. mutans recognizes the sequence motif NGG (SEQ ID NO: 2) and/or NAAR (R=A or G) (SEQ ID NO: 6) and directs cleavage of a target nucleic acid sequence 1 to 10, for example, 3 to 5 bp, upstream from this sequence. In certain embodiments, a Cas9 molecule of S. aureus recognizes the sequence motif NNGRR (R=A or G) (SEQ ID NO: 7) and directs cleavage of a target nucleic acid sequence 1 to 10, for example, 3 to 5, bp upstream from that sequence. In certain embodiments, a Cas9 molecule of S. aureus recognizes the sequence motif NNGRRN (R=A or G) (SEQ ID NO: 8) and directs cleavage of a target nucleic acid sequence 1 to 10, for example, 3 to 5, bp upstream from that sequence. In certain embodiments, a Cas9 molecule of S. aureus recognizes the sequence motif NNGRRT (R=A or G) (SEQ ID NO: 9) and directs cleavage of a target nucleic acid sequence 1 to 10, for example, 3 to 5, bp upstream from that sequence. In certain embodiments, a Cas9 molecule of S. aureus recognizes the sequence motif NNGRRV (R=A or G; V=A or C or G) (SEQ ID NO: 10) and directs cleavage of a target nucleic acid sequence 1 to 10, for example, 3 to 5, bp upstream from that sequence. A Cas9 molecule derived from Neisseria meningitidis (NmCas9) normally has a native PAM of NNNNGATT (SEQ ID NO: 11), but may have activity across a variety of PAMs, including a highly degenerate NNNNGNNN PAM (SEQ ID NO: 12) (Esvelt et al. Nature Methods 2013 doi:10.1038/nmeth.2681). In the aforementioned embodiments, N can be any nucleotide residue, for example, any of A, G, C, or T. Cas9 molecules can be engineered to alter the PAM specificity of the Cas9 molecule.

[0096] In some embodiments, the Cas9 protein recognizes a PAM sequence of or comprising NGG (SEQ ID NO: 2) or NGA (SEQ ID NO: 13) or NNNRRT (R=A or G) (SEQ ID NO: 14) or ATTCCT (SEQ ID NO: 15) or NGAN (SEQ ID NO: 16) or NGNG (SEQ ID NO: 17). In some embodiments, the Cas9 protein is a Cas9 protein of S. aureus and recognizes the sequence motif NNGRR (R=A or G) (SEQ ID NO: 7), NNGRRN (R=A or G) (SEQ ID NO: 8), NNGRRT (R=A or G) (SEQ ID NO: 9), or NNGRRV (R=A or G) (V=A or G or C) (SEQ ID NO: 10). In the aforementioned embodiments, N can be any nucleotide residue, for example, any of A, G, C, or T. In some embodiments, the PAM sequence comprises ATTCCT (SEQ ID NO: 15).

[0097] Additionally or alternatively, a nucleic acid encoding a Cas9 molecule or Cas9 polypeptide may comprise a nuclear localization sequence (NLS). Nuclear localization sequences are known in the art, for example, SV40 NLS (Pro-Lys-Lys-Lys-Arg-Lys-Val; SEQ ID NO: 61.

[0098] In some embodiments, the at least one Cas9 molecule is a mutant Cas9 molecule. The Cas9 protein can be mutated so that the nuclease activity is inactivated. An inactivated Cas9 protein (“iCas9”, also referred to as “dCas9”) with no endonuclease activity has been targeted to genes in bacteria, yeast, and human cells by gRNAs to silence gene expression through steric hindrance. Exemplary mutations with reference to the S. pyogenes Cas9 sequence to inactivate the nuclease activity include: D10A, E762A, H840A, N854A, N863A and/or D986A. A S. pyogenes Cas9 protein with the D10A mutation may comprise an amino acid sequence of SEQ ID NO: 131. A S. pyogenes Cas9 protein with D10A and H849A mutations may comprise an amino acid sequence of SEQ ID NO: 132. Exemplary mutations with reference to the S. aureus Cas9 sequence to inactivate the nuclease activity include D10A and N580A. In certain embodiments, the mutant S. aureus Cas9 molecule comprises a D10A mutation. The nucleotide sequence encoding this mutant S. aureus Cas9 is set forth in SEQ ID NO: 133. In certain embodiments, the mutant S. aureus Cas9 molecule comprises a N580A mutation. The nucleotide sequence encoding this mutant S. aureus Cas9 molecule is set forth in SEQ ID NO: 134.

[0099] In some embodiments, the Cas9 protein is a VQR variant. The VQR variant of Cas9 is a mutant with a different PAM recognition, as detailed in Kleinstiver, et al. (Nature 2015, 523, 481-485, incorporated herein by reference).

[0100] A polynucleotide encoding a Cas9 molecule can be a synthetic polynucleotide. For example, the synthetic polynucleotide can be chemically modified. The synthetic polynucleotide can be codon optimized, for example, at least one non-common codon or less-common codon has been replaced by a common codon. For example, the synthetic polynucleotide can direct the synthesis of an optimized messenger mRNA, for example, optimized for expression in a mammalian expression system, as described herein. An exemplary codon optimized nucleic acid sequence encoding a Cas9 molecule of S. pyogenes is set forth in SEQ ID NO: 20. Exemplary codon optimized nucleic acid sequences encoding a Cas9 molecule of S. aureus, and optionally containing nuclear localization sequences (NLSs), are set forth in SEQ ID NOs: 21-27. Another exemplary codon optimized nucleic acid sequence encoding a Cas9 molecule of S. aureus comprises the nucleotides 1293-4451 of SEQ ID NO: 28.

[0101] b. Cas Fusion Protein

[0102] Alternatively or additionally, the CRISPR/Cas9-based gene editing system can include a fusion protein. The fusion protein can comprise two heterologous polypeptide domains. The first polypeptide domain comprises a Cas9 protein or a mutant Cas9 protein. The first polypeptide domain is fused to at least one second polypeptide domain. The second polypeptide domain has a different activity that what is endogenous to Cas9 protein. For example, the second polypeptide domain may have an activity such as transcription activation activity, transcription repression activity, transcription release factor activity, histone modification activity, nuclease activity, nucleic acid association activity, methylase activity, demethylase activity, acetylation activity, and/or deacetylation activity. The activity of the second polypeptide domain may be direct or indirect. The second polypeptide domain may have this activity itself (direct), or it may recruit and/or interact with a polypeptide domain that has this activity (indirect). The second polypeptide domain may be at the C-terminal end of the first polypeptide domain, or at the N-terminal end of the first polypeptide domain, or a combination thereof. The fusion protein may include one second polypeptide domain. The fusion protein may include two of the second polypeptide domains. For example, the fusion protein may include a second polypeptide domain at the N-terminal end of the first polypeptide domain as well as a second polypeptide domain at the C-terminal end of the first polypeptide domain. In other embodiments, the fusion protein may include a single first polypeptide domain and more than one (for example, two or three) second polypeptide domains in tandem.

[0103] The linkage from the first polypeptide domain to the second polypeptide domain can be through reversible or irreversible covalent linkage or through a non-covalent linkage, as long as the linker does not interfere with the function of the second polypeptide domain. For example, a Cas polypeptide can be linked to a second polypeptide domain as part of a fusion protein. As another example, they can be linked through reversible non-covalent interactions such as avidin (or streptavidin)-biotin interaction, histidine-divalent metal ion interaction (such as, Ni, Co, Cu, Fe), interactions between multimerization (such as, dimerization) domains, or glutathione S-transferase (GST)-glutathione interaction. As yet another example, they can be linked covalently but reversibly with linkers such as dibromomaleimide (DBM) or amino-thiol conjugation.

[0104] In some embodiments, the fusion protein includes at least one linker. A linker may be included anywhere in the polypeptide sequence of the fusion protein, for example, between the first and second polypeptide domains. A linker may be of any length and design to promote or restrict the mobility of components in the fusion protein. A linker may comprise any amino acid sequence of about 2 to about 100, about 5 to about 80, about 10 to about 60, or about 20 to about 50 amino acids. A linker may comprise an amino acid sequence of at least about 2, 3, 4, 5, 10, 15, 20, 25, or 30 amino acids. A linker may comprise an amino acid sequence of less than about 100, 90, 80, 70, 60, 50, or 40 amino acids. A linker may include sequential or tandem repeats of an amino acid sequence that is 2 to 20 amino acids in length. Linkers may include, for example, a GS linker (Gly-Gly-Gly-Gly-Ser)n, wherein n is an integer between 0 and 10 (SEQ ID NO: 135). In a GS linker, n can be adjusted to optimize the linker length and achieve appropriate separation of the functional domains. Other examples of linkers may include, for example, Gly-Gly-Gly-Gly-Gly (SEQ ID NO: 136), Gly-Gly-Ala-Gly-Gly (SEQ ID NO: 137), Gly/Ser rich linkers such as Gly-Gly-Gly-Gly-Ser-Ser-Ser (SEQ ID NO: 138), or Gly/Ala rich linkers such as Gly-Gly-Gly-Gly-Ala-Ala-Ala (SEQ ID NO: 139).

[0105] In some embodiments, the second polypeptide domain has nuclease activity. A second polypeptide domain having nuclease activity may comprise, for example, FokI or TevI.

[0106] i) Transcription Activation Activity

[0107] The second polypeptide domain can have transcription activation activity, for example, a transactivation domain. For example, gene expression of endogenous mammalian genes, such as human genes, can be achieved by targeting a fusion protein of a first polypeptide domain, such as dCas9, and a transactivation domain to mammalian promoters via combinations of gRNAs. The transactivation domain can include a VP16 protein, multiple VP16 proteins, such as a VP48 domain or VP64 domain, p65 domain of NF kappa B transcription activator activity, TET1, VPR, VPH, Rta, and/or p300. For example, the fusion protein may comprise dCas9-p300. In some embodiments, p300 comprises a polypeptide having the amino acid sequence of SEQ ID NO: 140 or SEQ ID NO: 141. In other embodiments, the fusion protein comprises dCas9-VP64. In other embodiments, the fusion protein comprises VP64-dCas9-VP64. VP64-dCas9-VP64 may comprise a polypeptide having the amino acid sequence of SEQ ID NO: 142, encoded by the polynucleotide of SEQ ID NO: 143. VPH may comprise a polypeptide having the amino acid sequence of SEQ ID NO: 144, encoded by the polynucleotide of SEQ ID NO: 145. VPR may comprise a polypeptide having the amino acid sequence of SEQ ID NO: 146, encoded by the polynucleotide of SEQ ID NO: 147.

[0108] ii) Transcription Repression Activity

[0109] The second polypeptide domain can have transcription repression activity. Non-limiting examples of repressors include Kruppel associated box activity such as a KRAB domain or KRAB, MECP2, EED, ERF repressor domain (ERD), Mad mSIN3 interaction domain (SID) or Mad-SID repressor domain, SID4× repressor domain, MxiI repressor domain, SUV39H1, SUV39H2, G9A, ESET/SETBD1, Cir4, Su(var)3-9, Pr-SET7/8, SUV4-20H1, PR-set7, Suv4-20, Set9, EZH2, RIZ1, JMJD2A/JHDM3A, JMJD2B, JMJ2D2C/GASC1, JMJD2D, Rph1, JARID1A/RBP2, JARID1B/PLU-1, JARID1C/SMCX, JARID1D/SMCY, Lid, Jhn2, Jmj2, HDAC1, HDAC2, HDAC3, HDAC8, Rpd3, Hos1, Cir6, HDAC4, HDAC5, HDAC7, HDAC9, Hda1, Cir3, SIRT1, SIRT2, Sir2, Hst1, Hst2, Hst3, Hst4, HDAC11, DNMT1, DNMT3a/3b, DNMT3A-3L, MET1, DRM3, ZMET2, CMT1, CMT2, Laminin A, Laminin B, CTCF, and/or a domain having TATA box binding protein activity, or a combination thereof. In some embodiments, the second polypeptide domain has a KRAB domain activity, ERF repressor domain activity, MxiI repressor domain activity, SID4× repressor domain activity, Mad-SID repressor domain activity, DNMT3A or DNMT3L or fusion thereof activity, LSD1 histone demethylase activity, or TATA box binding protein activity. In some embodiments, the polypeptide domain comprises KRAB. For example, the fusion protein may be S. pyogenes dCas9-KRAB (polynucleotide sequence SEQ ID NO: 148; protein sequence SEQ ID NO: 149). The fusion protein may be S. aureus dCas9-KRAB (polynucleotide sequence SEQ ID NO: 150; protein sequence SEQ ID NO: 151).

[0110] iii) Transcription Release Factor Activity

[0111] The second polypeptide domain can have transcription release factor activity. The second polypeptide domain can have eukaryotic release factor 1 (ERF1) activity or eukaryotic release factor 3 (ERF3) activity.

[0112] iv) Histone Modification Activity

[0113] The second polypeptide domain can have histone modification activity. The second polypeptide domain can have histone deacetylase, histone acetyltransferase, histone demethylase, or histone methyltransferase activity. The histone acetyltransferase may be p300 or CREB-binding protein (CBP) protein, or fragments thereof. For example, the fusion protein may be dCas9-p300. In some embodiments, p300 comprises a polypeptide of SEQ ID NO: 140 or SEQ ID NO: 141.

[0114] v) Nuclease Activity

[0115] The second polypeptide domain can have nuclease activity that is different from the nuclease activity of the Cas9 protein. A nuclease, or a protein having nuclease activity, is an enzyme capable of cleaving the phosphodiester bonds between the nucleotide subunits of nucleic acids. Nucleases are usually further divided into endonucleases and exonucleases, although some of the enzymes may fall in both categories. Well known nucleases include deoxyribonuclease and ribonuclease. A second polypeptide domain having nuclease activity may comprise, for example, FokI and/or TevI.

[0116] vi) Nucleic Acid Association Activity

[0117] The second polypeptide domain can have nucleic acid association activity or nucleic acid binding protein-DNA-binding domain (DBD). A DBD is an independently folded protein domain that contains at least one motif that recognizes double- or single-stranded DNA. A DBD can recognize a specific DNA sequence (a recognition sequence) or have a general affinity to DNA. A nucleic acid association region may be selected from helix-turn-helix region, leucine zipper region, winged helix region, winged helix-turn-helix region, helix-loop-helix region, immunoglobulin fold, B3 domain, Zinc finger, HMG-box, Wor3 domain, and TAL effector DNA-binding domain.

[0118] vii) Methylase Activity

[0119] The second polypeptide domain can have methylase activity, which involves transferring a methyl group to DNA, RNA, protein, small molecule, cytosine, or adenine. In some embodiments, the second polypeptide domain includes a DNA methyltransferase.

[0120] viii) Demethylase Activity

[0121] The second polypeptide domain can have demethylase activity. The second polypeptide domain can include an enzyme that removes methyl (CH3-) groups from nucleic acids, proteins (in particular histones), and other molecules. Alternatively, the second polypeptide can convert the methyl group to hydroxymethylcytosine in a mechanism for demethylating DNA. The second polypeptide can catalyze this reaction. For example, the second polypeptide that catalyzes this reaction can be Tet1, also known as Tet1CD (Ten-eleven translocation methylcytosine dioxygenase 1; polynucleotide sequence SEQ ID NO: 152; amino acid sequence SEQ ID NO: 153). In some embodiments, the second polypeptide domain has histone demethylase activity. In some embodiments, the second polypeptide domain has DNA demethylase activity.

[0122] c. Guide RNA (gRNA)

[0123] The CRISPR/Cas-based gene editing system includes at least one gRNA molecule. For example, the CRISPR/Cas-based gene editing system may include two gRNA molecules. The at least one gRNA molecule can bind and recognize a target region. The gRNA provides the targeting of a CRISPR/Cas9-based gene editing system. The gRNA is a fusion of two noncoding RNAs: a crRNA and a tracrRNA. gRNA mimics the naturally occurring crRNA:tracrRNA duplex involved in the Type II Effector system. This duplex, which may include, for example, a 42-nucleotide crRNA and a 75-nucleotide tracrRNA, acts as a guide for the Cas9 to bind, and in some cases, cleave the target nucleic acid. The gRNA may target any desired DNA sequence by exchanging the sequence encoding a protospacer which confers targeting specificity through complementary base pairing with the desired DNA target. The CRISPR/Cas9-based gene editing system may include at least one gRNA, wherein the gRNAs target different DNA sequences. The target DNA sequences may be overlapping. The “target region” or “target sequence” or “protospacer” refers to the region of the target gene to which the CRISPR/Cas9-based gene editing system targets and binds or hybridizes to. The portion of the gRNA that targets the target sequence in the genome may be referred to as the “targeting sequence” or “targeting portion” or “targeting domain.” The CRISPR/Cas9-based gene editing system may include at least one gRNA, wherein the gRNAs target or hybridize to different DNA sequences. The target DNA sequences may be overlapping. The gRNA may comprise at its 5′ end the targeting domain that is sufficiently complementary to the target region to be able to hybridize to, for example, about 10 to about 20 nucleotides of the target region of the target gene, when it is followed by an appropriate Protospacer Adjacent Motif (PAM). The target sequence or protospacer is followed by a PAM sequence at the 3′ end of the target sequence or protospacer in the genome. Different Type II systems have differing PAM requirements, as detailed above.

[0124] “Protospacer” or “gRNA spacer” may refer to the region of the target sequence to which the CRISPR/Cas9-based gene editing system targets and binds or hybridizes; “protospacer” or “gRNA spacer” may also refer to the portion of the gRNA that is complementary to the targeted sequence in the genome. The protospacer may be, for example, 18 nucleotides or base pairs, 19 nucleotides or base pairs, 20 nucleotides or base pairs, 21 nucleotides or base pairs, 22 nucleotides or base pairs, 23 nucleotides or base pairs, 24 nucleotides or base pairs, 25 nucleotides or base pairs, 26 nucleotides or base pairs, or 27 nucleotides or base pairs in length.

[0125] The gRNA may include a gRNA scaffold. A gRNA scaffold facilitates Cas9 binding to the gRNA and may facilitate endonuclease activity. The gRNA scaffold is a polynucleotide sequence that follows the portion of the gRNA corresponding to sequence that the gRNA targets. Together, the gRNA targeting portion and gRNA scaffold form one polynucleotide. The constant region of the gRNA may include the sequence of SEQ ID NO: 63 (RNA), which is encoded by a sequence comprising SEQ ID NO: 62 (DNA).

[0126] The targeting domain of the gRNA does not need to be perfectly complementary to the target region of the target DNA. In some embodiments, the targeting domain of the gRNA is at least 80%, 85%, 90%, 95%, 96%, 97%, 98%, or at least 99% complementary to (or has 1, 2 or 3 mismatches compared to) the target region over a length of, such as, 10, 11, 12, 13, 14, 15, 16, 17, 18, 19, or 20 nucleotides. For example, the DNA-targeting domain of the gRNA may be at least 80% complementary over at least 18 nucleotides of the target region. The target region may be on either strand of the target DNA.

[0127] The gRNA may target and bind or hybridize to a region or fragment of the dystrophin gene. The gRNA may target and bind or hybridize to a region or fragment of a mutant dystrophin gene. The gRNA may target and bind or hybridize to a region or fragment of a wild-type dystrophin gene. The gRNA may target an intron. The gRNA may target an intron that is juxtaposed with or adjacent to an exon of the dystrophin gene. The gRNA may target an intron that is juxtaposed with or adjacent to an exon of a mutant dystrophin gene. A fragment may be about 5 to about 200, about 10 to about 200, about 5 to about 300, or about 10 to about 300 nucleotides in length. A fragment may be at least about 5, at least about 10, at least about 15, at least about 20, at least about 30, at least about 40, at least about 50, or at least about 100 nucleotides in length. gRNA may target a fragment or portion of the dystrophin gene that comprises a mutation or deletion, or a sequence proximal or adjacent to or juxtapositioned thereto. In some embodiments, the gRNA targets intron 51. Intron 51 of the human dystrophin gene may comprise a polynucleotide sequence of SEQ ID NO: 128. In some embodiments, the gRNA targets intron 44. Intron 44 of the human dystrophin gene may comprise a polynucleotide sequence of SEQ ID NO: 156.

[0128] The gRNA may target and/or bind to and/or hybridize to a polynucleotide sequence comprising at least one of SEQ ID NOs: 29-51 and 87, or a complement thereof, or a variant thereof, or a truncation thereof. The gRNA may be encoded by a polynucleotide sequence comprising at least one of SEQ ID NOs: 29-51 and 87, or a complement thereof, or a variant thereof, or a truncation thereof. The gRNA may comprise a polynucleotide sequence comprising at least one of SEQ ID NOs: 29-51 and 87, or a complement thereof, or a variant thereof, or a truncation thereof. The gRNA may comprise a polynucleotide sequence comprising at least one of SEQ ID NOs: 64-86, 88, or a complement thereof, or a variant thereof, or a truncation thereof. The gRNA spacer may comprise a polynucleotide sequence comprising at least one of SEQ ID NOs: 29-51, 87, or a complement thereof, or a variant thereof, or a truncation thereof. The gRNA spacer may be encoded by a polynucleotide sequence comprising at least one of SEQ ID NOs: 29-51, 87, or a complement thereof, or a variant thereof, or a truncation thereof. A truncation may be 1, 2, 3, 4, 5, 6, 7, 8, or 9 nucleotides shorter than the reference sequence. In some embodiments, the gRNA scaffold is encoded by the polynucleotide sequence of SEQ ID NO: 52, or a complement thereof.

[0129] The gRNA may target and/or bind to and/or hybridize to a polynucleotide sequence comprising at least one of SEQ ID NOs: 157-170, or a complement thereof, or a variant thereof, or a truncation thereof. The gRNA may be encoded by a polynucleotide sequence comprising at least one of SEQ ID NOs: 157-170, or a complement thereof, or a variant thereof, or a truncation thereof. The gRNA may comprise a polynucleotide sequence comprising at least one of SEQ ID NOs: 171-184, or a complement thereof, or a variant thereof, or a truncation thereof. A truncation may be 1, 2, 3, 4, 5, 6, 7, 8, or 9 nucleotides shorter than the reference sequence.

[0130] As described above, the gRNA molecule comprises a targeting domain (also referred to as targeting sequence), which is a polynucleotide sequence complementary to the target DNA sequence. The gRNA may comprise a “G” at the 5′ end of the targeting domain or complementary polynucleotide sequence. The CRISPR/Cas9-based gene editing system may use gRNAs of varying sequences and lengths. The targeting domain of a gRNA molecule may comprise at least a 10 base pair, at least a 11 base pair, at least a 12 base pair, at least a 13 base pair, at least a 14 base pair, at least a 15 base pair, at least a 16 base pair, at least a 17 base pair, at least a 18 base pair, at least a 19 base pair, at least a 20 base pair, at least a 21 base pair, at least a 22 base pair, at least a 23 base pair, at least a 24 base pair, at least a 25 base pair, at least a 30 base pair, or at least a 35 base pair complementary polynucleotide sequence of the target DNA sequence followed by a PAM sequence. In certain embodiments, the targeting domain of a gRNA molecule has 19-25 nucleotides in length. In certain embodiments, the targeting domain of a gRNA molecule is 20 nucleotides in length. In certain embodiments, the targeting domain of a gRNA molecule is 21 nucleotides in length. In certain embodiments, the targeting domain of a gRNA molecule is 22 nucleotides in length. In certain embodiments, the targeting domain of a gRNA molecule is 23 nucleotides in length.

[0131] The number of gRNA molecules that may be included in the CRISPR/Cas9-based gene editing system can be at least 1 gRNA, at least 2 different gRNAs, at least 3 different gRNAs, at least 4 different gRNAs, at least 5 different gRNAs, at least 6 different gRNAs, at least 7 different gRNAs, at least 8 different gRNAs, at least 9 different gRNAs, at least 10 different gRNAs, at least 11 different gRNAs, at least 12 different gRNAs, at least 13 different gRNAs, at least 14 different gRNAs, at least 15 different gRNAs, at least 16 different gRNAs, at least 17 different gRNAs, at least 18 different gRNAs, at least 18 different gRNAs, at least 20 different gRNAs, at least 25 different gRNAs, at least 30 different gRNAs, at least 35 different gRNAs, at least 40 different gRNAs, at least 45 different gRNAs, or at least 50 different gRNAs. The number of gRNA molecules that may be included in the CRISPR/Cas9-based gene editing system can be less than 50 different gRNAs, less than 45 different gRNAs, less than 40 different gRNAs, less than 35 different gRNAs, less than 30 different gRNAs, less than 25 different gRNAs, less than 20 different gRNAs, less than 19 different gRNAs, less than 18 different gRNAs, less than 17 different gRNAs, less than 16 different gRNAs, less than 15 different gRNAs, less than 14 different gRNAs, less than 13 different gRNAs, less than 12 different gRNAs, less than 11 different gRNAs, less than 10 different gRNAs, less than 9 different gRNAs, less than 8 different gRNAs, less than 7 different gRNAs, less than 6 different gRNAs, less than 5 different gRNAs, less than 4 different gRNAs, less than 3 different gRNAs, or less than 2 different gRNAs. The number of gRNAs that may be included in the CRISPR/Cas9-based gene editing system can be between at least 1 gRNA to at least 50 different gRNAs, at least 1 gRNA to at least 45 different gRNAs, at least 1 gRNA to at least 40 different gRNAs, at least 1 gRNA to at least 35 different gRNAs, at least 1 gRNA to at least 30 different gRNAs, at least 1 gRNA to at least 25 different gRNAs, at least 1 gRNA to at least 20 different gRNAs, at least 1 gRNA to at least 16 different gRNAs, at least 1 gRNA to at least 12 different gRNAs, at least 1 gRNA to at least 8 different gRNAs, at least 1 gRNA to at least 4 different gRNAs, at least 4 gRNAs to at least 50 different gRNAs, at least 4 different gRNAs to at least 45 different gRNAs, at least 4 different gRNAs to at least 40 different gRNAs, at least 4 different gRNAs to at least 35 different gRNAs, at least 4 different gRNAs to at least 30 different gRNAs, at least 4 different gRNAs to at least 25 different gRNAs, at least 4 different gRNAs to at least 20 different gRNAs, at least 4 different gRNAs to at least 16 different gRNAs, at least 4 different gRNAs to at least 12 different gRNAs, at least 4 different gRNAs to at least 8 different gRNAs, at least 8 different gRNAs to at least 50 different gRNAs, at least 8 different gRNAs to at least 45 different gRNAs, at least 8 different gRNAs to at least 40 different gRNAs, at least 8 different gRNAs to at least 35 different gRNAs, 8 different gRNAs to at least 30 different gRNAs, at least 8 different gRNAs to at least 25 different gRNAs, 8 different gRNAs to at least 20 different gRNAs, at least 8 different gRNAs to at least 16 different gRNAs, or 8 different gRNAs to at least 12 different gRNAs.

[0132] d. Donor Sequence

[0133] The CRISPR/Cas9-based gene editing system may include at least one donor sequence. A donor sequence may comprise a fragment of a dystrophin gene. A donor sequence may comprise a fragment of a wild-type dystrophin gene. For example, a donor sequence may comprise a nucleic acid sequence encoding an exon or any combination of exons of the dystrophin gene. The donor sequence may comprise an exon of the wild-type dystrophin gene or a functional equivalent thereof. The donor sequence may comprise one or more exons of the wild-type dystrophin gene or a functional equivalent thereof. The donor sequence may comprise one or more exons and/or introns of the wild-type dystrophin gene or a functional equivalent thereof. The donor sequence may comprise one or more exons of the wild-type dystrophin gene selected from exon 52, 53, 54, 55, 56, 57, 58, 59, 60, 61, 62, 63, 64, 65, 66, 67, 68, 69, 70, 71, 72, 73, 74, 75, 76, 77, 78, and 79, or a combination thereof, or a functional equivalent thereof. In some embodiments, the donor sequence comprises exon 52. In some embodiments, the donor sequence includes exons 52-79. In some embodiments, the donor sequence includes exons 45-79. In some embodiments, exons 52-79 is referred to as a super exon. In some embodiments, exons 45-79 is referred to as a super exon. The donor sequence may further include at least one additional polynucleotide corresponding to intron sequences surrounding or near the exon(s) to be inserted. The donor sequence may further include at least one additional polynucleotide corresponding to intron sequences surrounding or near exon 52. The donor sequence may comprise a polynucleotide sequence selected from SEQ ID NOs: 53-56 and 154-155. In some embodiments, the donor sequence includes exons 52-79 and the donor sequence comprises a polynucleotide sequence selected from SEQ ID NOs: 53-56. In some embodiments, the donor sequence includes exons 45-79 and the donor sequence comprises a polynucleotide sequence selected from SEQ ID NOs: 154-155.

[0134] The donor sequence may be flanked on both sides by a gRNA spacer and/or a PAM sequence. The donor sequence may be flanked on the 5′-end and the 3′-end by a gRNA spacer and/or a PAM sequence. The gRNA spacer and/or a PAM sequence that flank the donor sequence directs the Cas9 protein to cut or excise the donor fragment from the CRISPR/Cas9-based gene editing system. This may thereby liberate the donor sequence for insertion into the genome. In some embodiments, the targeting region of the gRNA is complementary to the gRNA spacer that flanks the donor sequence. The gRNA spacer may comprise or be encoded by a polynucleotide selected from SEQ ID NO: 29-51 and 87 and 157-170.

[0135] The gRNA and donor sequence may be present in a variety of molar ratios. The molar ratio between the gRNA and donor sequence may be 1:1, or 1:5, or from 5:1 to 1:10, or from 1:1 to 1:5. The molar ratio between the gRNA and donor sequence may be at least 1:1, at least 1:2, at least 1:3, at least 1:4, at least 1:5, at least 1:6, at least 1:7, at least 1:8, at least 1:9, at least 1:10, at least 1:15, or at least 1:20. The molar ratio between the gRNA and donor sequence may be less than 20:1, less than 15:1, less than 10:1, less than 9:1, less than 8:1, less than 7:1, less than 6:1, less than 5:1, less than 4:1, less than 3:1, less than 2:1, or less than 1:1.

[0136] e. Repair Pathways

[0137] The CRISPR/Cas9-based gene editing system may be used to introduce site-specific double strand breaks at targeted genomic loci, such as an intron or exon of a dystrophin gene. Site-specific double-strand breaks are created when the CRISPR/Cas9-based gene editing system binds to a target DNA sequences, thereby permitting cleavage of the target DNA. This DNA cleavage may stimulate the natural DNA-repair machinery, leading to one of two possible repair pathways: homology-directed repair (HDR) or the non-homologous end joining (NHEJ) pathway.

[0138] i) Homology-Directed Repair (HDR)

[0139] Restoration of protein expression from a gene may involve homology-directed repair (HDR). A donor template may be administered to a cell. The donor template may include a nucleotide sequence encoding a full-functional protein or a partially functional protein. In such embodiments, the donor template may include fully functional gene construct for restoring a mutant gene, or a fragment of the gene that after homology-directed repair, leads to restoration of the mutant gene. In other embodiments, the donor template may include a nucleotide sequence encoding a mutated version of an inhibitory regulatory element of a gene. Mutations may include, for example, nucleotide substitutions, insertions, deletions, or a combination thereof. In such embodiments, introduced mutation(s) into the inhibitory regulatory element of the gene may reduce the transcription of or binding to the inhibitory regulatory element.

[0140] ii) NHEJ

[0141] Restoration of protein expression from gene may be through template-free NHEJ-mediated DNA repair. In certain embodiments, NHEJ is a nuclease mediated NHEJ, which in certain embodiments, refers to NHEJ that is initiated a Cas9 molecule that cuts double stranded DNA. The method comprises administering a presently disclosed CRISPR/Cas9-based gene editing system or a composition comprising thereof to a subject for gene editing.

[0142] Nuclease mediated NHEJ may correct a mutated target gene and offer several potential advantages over the HDR pathway. For example, NHEJ does not require a donor template, which may cause nonspecific insertional mutagenesis. In contrast to HDR, NHEJ operates efficiently in all stages of the cell cycle and therefore may be effectively exploited in both cycling and post-mitotic cells, such as muscle fibers. This provides a robust, permanent gene restoration alternative to oligonucleotide-based exon skipping or pharmacologic forced read-through of stop codons and could theoretically require as few as one drug treatment.

### 4. GENETIC CONSTRUCTS

[0143] The CRISPR/Cas9-based gene editing system may be encoded by or comprised within one or more genetic constructs. The CRISPR/Cas9-based gene editing system may comprise one or more genetic constructs. The genetic construct, such as a plasmid or expression vector, may comprise a nucleic acid that encodes the CRISPR/Cas9-based gene editing system and/or at least one of the gRNAs and/or a donor sequence. In certain embodiments, a genetic construct encodes one gRNA molecule, i.e., a first gRNA molecule, and optionally a Cas9 molecule or fusion protein. In some embodiments, a genetic construct encodes two gRNA molecules, i.e., a first gRNA molecule and a second gRNA molecule, and optionally a Cas9 molecule or fusion protein. In some embodiments, a first genetic construct encodes one gRNA molecule, i.e., a first gRNA molecule, and optionally a Cas9 molecule or fusion protein, and a second genetic construct encodes one gRNA molecule, i.e., a second gRNA molecule, and optionally a Cas9 molecule or fusion protein. In some embodiments, a first genetic construct encodes one gRNA molecule and one donor sequence, and a second genetic construct encodes a Cas9 molecule or fusion protein. In some embodiments, a first genetic construct encodes one gRNA molecule and a Cas9 molecule or fusion protein, and a second genetic construct encodes one donor sequence.

[0144] Genetic constructs may include polynucleotides such as vectors and plasmids. The genetic construct may be a linear minichromosome including centromere, telomeres, or plasmids or cosmids. The vector may be an expression vectors or system to produce protein by routine techniques and readily available starting materials including Sambrook et al., Molecular Cloning and Laboratory Manual, Second Ed., Cold Spring Harbor (1989), which is incorporated fully by reference. The construct may be recombinant. The genetic construct may be part of a genome of a recombinant viral vector, including recombinant lentivirus, recombinant adenovirus, and recombinant adenovirus associated virus. The genetic construct may comprise regulatory elements for gene expression of the coding sequences of the nucleic acid. The regulatory elements may be a promoter, an enhancer, an initiation codon, a stop codon, or a polyadenylation signal.

[0145] The genetic construct may comprise heterologous nucleic acid encoding the CRISPR/Cas-based gene editing system and may further comprise an initiation codon, which may be upstream of the CRISPR/Cas-based gene editing system coding sequence, and a stop codon, which may be downstream of the CRISPR/Cas-based gene editing system coding sequence. The genetic construct may include more than one stop codon, which may be downstream of the CRISPR/Cas-based gene editing system coding sequence. In some embodiments, the genetic construct includes 1, 2, 3, 4, or 5 stop codons. In some embodiments, the genetic construct includes 1, 2, 3, 4, or 5 stop codons downstream of the sequence encoding the donor sequence. A stop codon may be in-frame with a coding sequence in the CRISPR/Cas-based gene editing system. For example, one or more stop codons may be in-frame with the donor sequence. The genetic construct may include one or more stop codons that are out of frame of a coding sequence in the CRISPR/Cas-based gene editing system. For example, one stop codon may be in-frame with the donor sequence, and two other stop codons may be included that are in the other two possible reading frames. A genetic construct may include a stop codon for all three potential reading frames. The initiation and termination codon may be in frame with the CRISPR/Cas-based gene editing system coding sequence.

[0146] The vector may also comprise a promoter that is operably linked to the CRISPR/Cas-based gene editing system coding sequence. The promoter may be a constitutive promoter, an inducible promoter, a repressible promoter, or a regulatable promoter. The promoter may be a ubiquitous promoter. The promoter may be a tissue-specific promoter. The tissue specific promoter may be a muscle specific promoter. The tissue specific promoter may be a skin specific promoter. The CRISPR/Cas-based gene editing system may be under the light-inducible or chemically inducible control to enable the dynamic control of gene/genome editing in space and time. The promoter operably linked to the CRISPR/Cas-based gene editing system coding sequence may be a promoter from simian virus 40 (SV40), a mouse mammary tumor virus (MMTV) promoter, a human immunodeficiency virus (HIV) promoter such as the bovine immunodeficiency virus (BIV) long terminal repeat (LTR) promoter, a Moloney virus promoter, an avian leukosis virus (ALV) promoter, a cytomegalovirus (CMV) promoter such as the CMV immediate early promoter, Epstein Barr virus (EBV) promoter, or a Rous sarcoma virus (RSV) promoter. The promoter may also be a promoter from a human gene such as human ubiquitin C (hUbC), human actin, human myosin, human hemoglobin, human muscle creatine, or human metalothionein. Examples of a tissue specific promoter, such as a muscle or skin specific promoter, natural or synthetic, are described in U.S. Patent Application Publication No. US20040175727, the contents of which are incorporated herein in its entirety. The promoter may be a CK8 promoter, a Spc512 promoter, a MHCK7 promoter, for example.

[0147] The genetic construct may also comprise a polyadenylation signal, which may be downstream of the CRISPR/Cas-based gene editing system. The polyadenylation signal may be a SV40 polyadenylation signal, LTR polyadenylation signal, bovine growth hormone (bGH) polyadenylation signal, human growth hormone (hGH) polyadenylation signal, or human β-globin polyadenylation signal. The SV40 polyadenylation signal may be a polyadenylation signal from a pCEP4 vector (Invitrogen, San Diego, Calif.).

[0148] Coding sequences in the genetic construct may be optimized for stability and high levels of expression. In some instances, codons are selected to reduce secondary structure formation of the RNA such as that formed due to intramolecular bonding.

[0149] The genetic construct may also comprise an enhancer upstream of the CRISPR/Cas-based gene editing system or gRNAs. The enhancer may be necessary for DNA expression. The enhancer may be human actin, human myosin, human hemoglobin, human muscle creatine or a viral enhancer such as one from CMV, HA, RSV, or EBV. Polynucleotide function enhancers are described in U.S. Pat. Nos. 5,593,972, 5,962,428, and WO94/016737, the contents of each are fully incorporated by reference. The genetic construct may also comprise a mammalian origin of replication in order to maintain the vector extrachromosomally and produce multiple copies of the vector in a cell. The genetic construct may also comprise a regulatory sequence, which may be well suited for gene expression in a mammalian or human cell into which the vector is administered. The genetic construct may also comprise a reporter gene, such as green fluorescent protein (“GFP”) and/or a selectable marker, such as hygromycin (“Hygro”).

[0150] The genetic construct may be useful for transfecting cells with nucleic acid encoding the CRISPR/Cas-based gene editing system, which the transformed host cell is cultured and maintained under conditions wherein expression of the CRISPR/Cas-based gene editing system takes place. The genetic construct may be transformed or transduced into a cell. The genetic construct may be formulated into any suitable type of delivery vehicle including, for example, a viral vector, lentiviral expression, mRNA electroporation, and lipid-mediated transfection for delivery into a cell. The genetic construct may be part of the genetic material in attenuated live microorganisms or recombinant microbial vectors which live in cells. The genetic construct may be present in the cell as a functioning extrachromosomal molecule.

[0151] Further provided herein is a cell transformed or transduced with a system or component thereof as detailed herein. Suitable cell types are detailed herein. In some embodiments, the cell is a stem cell. The stem cell may be a human stem cell. In some embodiments, the cell is an embryonic stem cell. The stem cell may be a human pluripotent stem cell (iPSCs). Further provided are stem cell-derived neurons, such as neurons derived from iPSCs transformed or transduced with a DNA targeting system or component thereof as detailed herein.

[0152] a. Viral Vectors

[0153] A genetic construct may be a viral vector. Further provided herein is a viral delivery system. Viral delivery systems may include, for example, lentivirus, retrovirus, adenovirus, mRNA electroporation, or nanoparticles. In some embodiments, the vector is a modified lentiviral vector. In some embodiments, the viral vector is an adeno-associated virus (AAV) vector. The AAV vector is a small virus belonging to the genus Dependovirus of the Parvoviridae family that infects humans and some other primate species.

[0154] AAV vectors may be used to deliver CRISPR/Cas9-based gene editing systems using various construct configurations. For example, AAV vectors may deliver Cas9 or fusion protein and gRNA expression cassettes on separate vectors or on the same vector. Alternatively, if the small Cas9 proteins or fusion proteins, derived from species such as Staphylococcus aureus or Neisseria meningitidis, are used then both the Cas9 and up to two gRNA expression cassettes may be combined in a single AAV vector. In some embodiments, the AAV vector has a 4.7 kb packaging limit.

[0155] In some embodiments, the AAV vector is a modified AAV vector. The modified AAV vector may have enhanced cardiac and/or skeletal muscle tissue tropism. The modified AAV vector may be capable of delivering and expressing the CRISPR/Cas9-based gene editing system in the cell of a mammal. For example, the modified AAV vector may be an AAV-SASTG vector (Piacentino et al. Human Gene Therapy 2012, 23, 635-646). The modified AAV vector may be based on one or more of several capsid types, including AAV1, AAV2, AAV5, AAV6, AAV8, and AAV9. The modified AAV vector may be based on AAV2 pseudotype with alternative muscle-tropic AAV capsids, such as AAV2/1, AAV2/6, AAV2/7, AAV2/8, AAV2/9, AAV2.5, and AAV/SASTG vectors that efficiently transduce skeletal muscle or cardiac muscle by systemic and local delivery (Seto et al. Current Gene Therapy 2012, 12, 139-151). The modified AAV vector may be AAV2i8G9 (Shen et al. J. Biol. Chem. 2013, 288, 28814-28823).

[0156] The genetic construct may comprise a polynucleotide sequence selected from SEQ ID NOs: 57-60. The genetic construct may comprise a polynucleotide sequence selected from SEQ ID NOs: 29-51, 53-56, 87, 154-155, 157-169, and 170, or a complement thereof, or a fragment thereof.

### 5. PHARMACEUTICAL COMPOSITIONS

[0157] Further provided herein are pharmaceutical compositions comprising the above-described genetic constructs or gene editing systems. In some embodiments, the pharmaceutical composition may comprise about 1 ng to about 10 mg of DNA encoding the CRISPR/Cas-based gene editing system. The systems or genetic constructs as detailed herein, or at least one component thereof, may be formulated into pharmaceutical compositions in accordance with standard techniques well known to those skilled in the pharmaceutical art. The pharmaceutical compositions can be formulated according to the mode of administration to be used. In cases where pharmaceutical compositions are injectable pharmaceutical compositions, they are sterile, pyrogen free, and particulate free. An isotonic formulation is preferably used. Generally, additives for isotonicity may include sodium chloride, dextrose, mannitol, sorbitol and lactose. In some cases, isotonic solutions such as phosphate buffered saline are preferred. Stabilizers include gelatin and albumin. In some embodiments, a vasoconstriction agent is added to the formulation.

[0158] The composition may further comprise a pharmaceutically acceptable excipient. The pharmaceutically acceptable excipient may be functional molecules as vehicles, adjuvants, carriers, or diluents. The term “pharmaceutically acceptable carrier,” may be a non-toxic, inert solid, semi-solid or liquid filler, diluent, encapsulating material or formulation auxiliary of any type. Pharmaceutically acceptable carriers include, for example, diluents, lubricants, binders, disintegrants, colorants, flavors, sweeteners, antioxidants, preservatives, glidants, solvents, suspending agents, wetting agents, surfactants, emollients, propellants, humectants, powders, pH adjusting agents, and combinations thereof. The pharmaceutically acceptable excipient may be a transfection facilitating agent, which may include surface active agents, such as immune-stimulating complexes (ISCOMS), Freunds incomplete adjuvant, LPS analog including monophosphoryl lipid A, muramyl peptides, quinone analogs, vesicles such as squalene and squalene, hyaluronic acid, lipids, liposomes, calcium ions, viral proteins, polyanions, polycations, or nanoparticles, or other known transfection facilitating agents. The transfection facilitating agent may be a polyanion, polycation, including poly-L-glutamate (LGS), or lipid. The transfection facilitating agent may be poly-L-glutamate, and more preferably, the poly-L-glutamate may be present in the composition for gene editing in skeletal muscle or cardiac muscle at a concentration less than 6 mg/mL.

### 6. ADMINISTRATION

[0159] The systems or genetic constructs as detailed herein, or at least one component thereof, may be administered or delivered to a cell. Methods of introducing a nucleic acid into a host cell are known in the art, and any known method can be used to introduce a nucleic acid (e.g., an expression construct) into a cell. Suitable methods include, for example, viral or bacteriophage infection, transfection, conjugation, protoplast fusion, polycation or lipid:nucleic acid conjugates, lipofection, electroporation, nucleofection, immunoliposomes, calcium phosphate precipitation, polyethyleneimine (PEI)-mediated transfection, DEAE-dextran mediated transfection, liposome-mediated transfection, particle gun technology, calcium phosphate precipitation, direct micro injection, nanoparticle-mediated nucleic acid delivery, and the like. In some embodiments, the composition may be delivered by mRNA delivery and ribonucleoprotein (RNP) complex delivery. The system, genetic construct, or composition comprising the same, may be electroporated using BioRad Gene Pulser Xcell or Amaxa Nucleofector IIb devices or other electroporation device. Several different buffers may be used, including BioRad electroporation solution, Sigma phosphate-buffered saline product #D8537 (PBS), Invitrogen OptiMEM I (OM), or Amaxa Nucleofector solution V (N.V.). Transfections may include a transfection reagent, such as Lipofectamine 2000.

[0160] The systems or genetic constructs as detailed herein, or at least one component thereof, or the pharmaceutical compositions comprising the same, may be administered to a subject. Such compositions can be administered in dosages and by techniques well known to those skilled in the medical arts taking into consideration such factors as the age, sex, weight, and condition of the particular subject, and the route of administration. The presently disclosed systems, or at least one component thereof, genetic constructs, or compositions comprising the same, may be administered to a subject by different routes including orally, parenterally, sublingually, transdermally, rectally, transmucosally, topically, intranasal, intravaginal, via inhalation, via buccal administration, intrapleurally, intravenous, intraarterial, intraperitoneal, subcutaneous, intradermally, epidermally, intramuscular, intranasal, intrathecal, intracranial, and intraarticular or combinations thereof. In certain embodiments, the system, genetic construct, or composition comprising the same, is administered to a subject intramuscularly, intravenously, or a combination thereof. The systems, genetic constructs, or compositions comprising the same may be delivered to a subject by several technologies including DNA injection (also referred to as DNA vaccination) with and without in vivo electroporation, liposome mediated, nanoparticle facilitated, recombinant vectors such as recombinant lentivirus, recombinant adenovirus, and recombinant adenovirus associated virus. The composition may be injected into the brain or other component of the central nervous system. The composition may be injected into the skeletal muscle or cardiac muscle. For example, the composition may be injected into the tibialis anterior muscle or tail. For veterinary use, the systems, genetic constructs, or compositions comprising the same may be administered as a suitably acceptable formulation in accordance with normal veterinary practice. The veterinarian may readily determine the dosing regimen and route of administration that is most appropriate for a particular animal. The systems, genetic constructs, or compositions comprising the same may be administered by traditional syringes, needleless injection devices, “microprojectile bombardment gone guns,” or other physical methods such as electroporation (“EP”), “hydrodynamic method”, or ultrasound. Alternatively, transient in vivo delivery of CRISPR/Cas-based systems by non-viral or non-integrating viral gene transfer, or by direct delivery of purified proteins and gRNAs containing cell-penetrating motifs may enable highly specific correction and/or restoration in situ with minimal or no risk of exogenous DNA integration.

[0161] Upon delivery of the presently disclosed systems or genetic constructs as detailed herein, or at least one component thereof, or the pharmaceutical compositions comprising the same, and thereupon the vector into the cells of the subject, the transfected cells may express the gRNA molecule(s) and the Cas9 molecule or fusion protein.

[0162] a. Cell Types

[0163] Any of the delivery methods and/or routes of administration detailed herein can be utilized with a myriad of cell types. Further provided herein is a cell transformed or transduced with a system or component thereof as detailed herein. For example, provided herein is a cell comprising an isolated polynucleotide encoding a CRISPR/Cas9 system as detailed herein. Suitable cell types are detailed herein, for example, those cell types currently under investigation for cell-based therapies, including, but not limited to, immortalized myoblast cells, such as wild-type and DMD patient derived lines, primal DMD dermal fibroblasts, stem cells such as induced pluripotent stem cells, embryonic stem cell, hematopoietic stem cell, bone marrow-derived progenitors, skeletal muscle progenitors, human skeletal myoblasts from DMD patients, CD 133+ cells, mesoangioblasts, cardiomyocytes, hepatocytes, chondrocytes, mesenchymal progenitor cells, hematopoietic stem cells, smooth muscle cells, and MyoD- or Pax7-transduced cells, or other myogenic progenitor cells. The cell may be a human stem cell. The stem cell may be a human induced pluripotent stem cell (iPSC). The cell may be a muscle cell. Immortalization of human myogenic cells can be used for clonal derivation of genetically corrected myogenic cells. Cells can be modified ex vivo to isolate and expand clonal populations of immortalized DMD myoblasts that include a genetically corrected or restored dystrophin gene and are free of other nuclease-introduced mutations in protein coding regions of the genome.

### 7. KITS

[0164] Provided herein is a kit, which may be used to correct a mutated dystrophin gene and/or restore dystrophin function. The kit comprises genetic constructs or a composition comprising the same, for restoring dystrophin function, as described above, and instructions for using said composition. In some embodiments, the kit comprises at least one gRNA comprising or hybridizing to or targeting or encoded by a polynucleotide sequence selected from SEQ ID NOs: 29-51, 87, 157-170, a complement thereof, a variant thereof, or fragment thereof, and/or at least one gRNA spacer comprising or encoded by a polynucleotide sequence selected from SEQ ID NOs: 29-51, 87, 157-170, a complement thereof, a variant thereof, or fragment thereof, and/or at least one gRNA comprising a polynucleotide sequence selected from SEQ ID NOs: 64-86, 88, 171-184, a complement thereof, a variant thereof, or fragment thereof, and/or a donor sequence comprising a polynucleotide sequence selected from SEQ ID NOs: 53-56, 154, and 155, a complement thereof, a variant thereof, or fragment thereof. The kit may further include instructions for using the CRISPR/Cas-based gene editing system.

[0165] Instructions included in kits may be affixed to packaging material or may be included as a package insert. While the instructions are typically written on printed materials they are not limited to such. Any medium capable of storing such instructions and communicating them to an end user is contemplated by this disclosure. Such media include, but are not limited to, electronic storage media (e.g., magnetic discs, tapes, cartridges, chips), optical media (e.g., CD ROM), and the like. As used herein, the term “instructions” may include the address of an internet site that provides the instructions.

[0166] The genetic constructs or a composition comprising thereof for restoring dystrophin function may include a modified AAV vector that includes a gRNA molecule(s) and a Cas9 protein or fusion protein, as described above, that specifically binds and cleaves a region of the dystrophin gene. The CRISPR/Cas-based gene editing system, as described above, may be included in the kit to specifically bind and target a particular region, for example, exon 52 or intron 51 or intron 44, in the gene.

### 8. METHODS

[0167] a. Methods for Restoring Dystrophin Function

[0168] The CRISPR/Cas9-based gene editing systems provided herein may be used for restoring dystrophin function. The CRISPR/Cas9-based gene editing systems may restore dystrophin function by adding one or more exons to restore the reading frame of dystrophin. Use of the presently disclosed CRISPR/Cas9-based gene editing systems delivered to a target muscle, for example, may restore the expression of a full-functional or partially-functional protein with a repair template or donor DNA, which can replace the entire gene or the region containing the mutation.

[0169] Provided herein are methods of restoring dystrophin function. The methods may be used for restoring dystrophin function in a cell or a subject having a mutant dystrophin gene. The methods may include contacting the cell or the subject with a system as detailed herein, a recombinant polynucleotide as detailed herein, or a vector as detailed herein. In some embodiments, dystrophin function is restored by insertion of the donor sequence, for example, insertion of exons 52-79 or exons 45-79 of the wild-type dystrophin gene. In some embodiments, the subject is suffering from Duchenne Muscular Dystrophy.

[0170] The methods may be used for restoring dystrophin function in a cell or a subject having a disrupted dystrophin gene caused by one or more deleted or mutated exons. The methods may include contacting the cell or the subject with a system as detailed herein, a recombinant polynucleotide as detailed herein, or a vector as detailed herein. In some embodiments, dystrophin function is restored by inserting one or more wild-type exons of dystrophin gene corresponding to the one or more deleted or mutated exons. In some embodiments, dystrophin function is restored by insertion of the donor sequence, for example, insertion of exons 52-79 or exons 45-79 of the wild-type dystrophin gene. In some embodiments, the subject is suffering from Duchenne Muscular Dystrophy.

### 9. EXAMPLES

[0171] The foregoing may be better understood by reference to the following examples, which are presented for purposes of illustration and are not intended to limit the scope of the invention. The present disclosure has multiple aspects and embodiments, illustrated by the appended non-limiting examples.

### Example 1

### Materials and Methods

[0172] Plasmid Design and AAV Production. The ITR-containing Staphylococcus aureus Cas9 (pAAV-SaCas9) expression plasmid was generated by adding a 3×HA epitope to the carboxyl-terminus of SaCas9 using Gibson cloning strategies. The CMV-SaCas9-3×HA-polyA was transferred to a new plasmid (pSaCas9) without ITRs for stability in cell culture experiments. A separate plasmid with a hU6-driven guide RNA cassette (Nelson, C. E., et al. Science 2016, 351, 403-407) (pU6-gRNA) was used with BbsI cloning to screen guides in vitro. For AAV-gRNA-donor plasmids (pAAV-g12-Ex52, pAAV-g7-Ex52, and pAAv-g7-Superexon), gene blocks were synthesized by Integrated DNA technology (IDT) and integrated into ITR-containing plasmids by Gibson cloning strategies. Intact ITRs were verified by SmaI digest before AAV production on all vectors. Multiple batches of AAV2 and AAV9 were produced at Duke University. Titers were measured by qPCR with a plasmid standard curve.

[0173] In Vitro gRNA Screening. A panel of gRNAs (TABLE 1) were designed to target intron 51 of the human DMD gene and compared for SaCas9 activity by Surveyor assay in HEK293T cells and DMD patient myoblasts. HEK293T cells were maintained in Dulbecco's Modified Eagle's Medium (DMEM, Invitrogen) with 10% Fetal Bovine Serum (FBS, Sigma) and 1% penicillin-streptomycin (P/S, Gibco). Immortalized DMD patient 8036 myoblasts (DM8036 cell line with a deletion of exons 48-50 in the DMD gene)(Mamchaoui, K., et al. Skelet. Muscle 2011, 1, 34) were maintained in skeletal muscle media (PromoCell) with 20% FBS (Sigma), 50 μg/mL fetuin (Sigma), 10 ng/mL human epidermal growth factor (Sigma), 1 ng/mL human basic fibroblast growth factor (bFGF, Sigma), 10 μg/mL human insulin (Sigma), 400 ng/mL dexamethasone (Sigma), 1% GlutaMAX (Invitrogen), and 1% P/S. Cells were incubated at 37° C. with 5% CO₂. HEK293T cells were transfected with 375 ng pSaCas9 and 125 ng pU6-gRNA plasmid using Lipofectamine 2000 (Invitrogen) according to the manufacturer's protocol. DMD myoblasts were electroporated with 10 μg pSaCas9 and 10 μg pU6-gRNA plasmid with a Gene Pulser XCell (BioRAD) in PBS using previously optimized conditions (Ousterout, O. G., et al. Mol. Ther. 2015, 23, 523-532). Cells were incubated for 72 hours, and genomic DNA was isolated with a DNeasy kit (Qiagen). Indels were identified by PCR of the region of interest (Surveyor Primers provided in TABLE 2) performed using the Invitrogen AccuPrime High Fidelity PCR kit, following by incubation with the Surveyor Nuclease and electrophoresed on TBE gels (Life Technologies) as previously described (Nelson, C. E., et al. Science 2016, 351, 403-407; Guschin, D. Y., et al. Methods Mol. Biol. 2010, 649, 247-256).

TABLE 1
SaCas9 human DMD intron 51 target sequences.

| | Spacer Sequence | | |
|---|---|---|---|
| | (Sequence the gRNA targets | | |
| | and binds) | PAM | gRNA |
| gScbl | GCACTACCAGAGCTAACTCA | NNGRRT | GCACUACCAGAGCUAACUCA |
| | (SEQ ID NO: 87) | (SEQ ID | (SEQ ID NO: 88) |
| | | NO: 9) | |
| g1 | CTTTACTTTGTATTATGTAAA | AGGAAT | CUUUACUUUGUAUUAUGUAAA |
| | (SEQ ID NO: 29) | (SEQ ID | (SEQ ID NO: 64) |
| | | NO: 89) | |
| g2 | TTTGAAATATTTTTGATATCT | AAGAAT | UUUGAAAUAUUUUUGAUAUCU |
| | (SEQ ID NO: 30) | (SEQ ID | (SEQ ID NO: 65) |
| | | NO: 90) | |
| g3 | TTTAAGTAATCCGAGGTACTC | CGGAAT | UUUAAGUAAUCCGAGGUACUC |
| | (SEQ ID NO: 31) | (SEQ ID | (SEQ ID NO: 66) |
| | | NO: 91) | |
| g4 | TTTAAATACATTGTCGTAATT | CAGAAT | UUUAAAUACAUUGUCGUAAUU |
| | (SEQ ID NO: 32) | (SEQ ID | (SEQ ID NO: 67) |
| | | NO: 92) | |
| g5 | TACCTTAATTTTGACGTCACA | CAGAAT | UACCUUAAUUUUGACGUCACA |
| | (SEQ ID NO: 33) | (SEQ ID | (SEQ ID NO: 68) |
| | | NO: 92) | |
| g6 | ATTTGACAGGTGAGAAATCTC | AGGGGT | AUUUGACAGGUGAGAAAUCUC |
| | (SEQ ID NO: 34) | (SEQ ID | (SEQ ID NO: 69) |
| | | NO: 93) | |
| g7 | TCATTTATAATACAGGGGAAT | AGGAAT | UCAUUUAUAAUACAGGGGAAU |
| | (SEQ ID NO: 35) | (SEQ ID | (SEQ ID NO: 70) |
| | | NO: 89) | |
| g8 | TTAAAGTCATTTATAATACAG | GGGAAT | UUAAAGUCAUUUAUAAUACAG |
| | (SEQ ID NO: 36) | (SEQ ID | (SEQ ID NO: 71) |
| | | NO: 94) | |
| g9 | AAATAGACACTGAAGAAAGGG | AAGAAT | AAAUAGACACUGAAGAAAGGG |
| | (SEQ ID NO: 37) | (SEQ ID | (SEQ ID NO: 72) |
| | | NO: 90) | |
| g10 | CCCCAATTAAAATAAAATTTA | CTGAGT | CCCCAAUUAAAAUAAAAUUUA |
| | (SEQ ID NO: 38) | (SEQ ID | (SEQ ID NO: 73) |
| | | NO: 95) | |
| g11 | TAAGTAATCCGAGGTACTC | CGGAAT | UAAGUAAUCCGAGGUACUC |
| (g3) | (SEQ ID NO: 39) | (SEQ ID | (SEQ ID NO: 74) |
| | | NO: 91) | |
| g12 | TTAAGTAATCCGAGGTACTC | CGGAAT | UUAAGUAAUCCGAGGUACUC |
| (g3) | (SEQ ID NO: 40) | (SEQ ID | (SEQ ID NO: 75) |
| | | NO: 91) | |
| g13 | GTTTAAGTAATCCGAGGTACT | CGGAAT | GUUUAAGUAAUCCGAGGUAC |
| (g3) | C | (SEQ ID | UC |
| | (SEQ ID NO: 41) | NO: 91) | (SEQ ID NO: 76) |
| g14 | GGTTTAAGTAATCCGAGGTAC | CGGAAT | GGUUUAAGUAAUCCGAGGUA |
| (g3) | TC | (SEQ ID | CUC |
| | (SEQ ID NO: 42) | NO: 91) | (SEQ ID NO: 77) |
| g15 | TTGACAGGTGAGAAATCTC | AGGGGT | UUGACAGGUGAGAAAUCUC |
| (g6) | (SEQ ID NO: 43) | (SEQ ID | (SEQ ID NO: 78) |
| | | NO: 93) | |
| g16 | TTTGACAGGTGAGAAATCTC | AGGGGT | UUUGACAGGUGAGAAAUCUC |
| (g6) | (SEQ ID NO: 44) | (SEQ ID | (SEQ ID NO: 79) |
| | | NO: 93) | |
| g17 | CATTTGACAGGTGAGAAATCT | AGGGGT | CAUUUGACAGGUGAGAAAUCU |
| (g6) | C | (SEQ ID | C |
| | (SEQ ID NO: 45) | NO: 93) | (SEQ ID NO: 80) |
| g18 | TCATTTGACAGGTGAGAAATC | AGGGGT | UCAUUUGACAGGUGAGAAAUC |
| (g6) | TC | (SEQ ID | UC |
| | (SEQ ID NO: 46) | NO: 93) | (SEQ ID NO: 81) |
| g19 | ATTTATAATACAGGGGAAT | AGGAAT | AUUUAUAAUACAGGGGAAU |
| (g7) | (SEQ ID NO: 47) | (SEQ ID | (SEQ ID NO: 82) |
| | | NO: 89) | |
| g20 | CATTTATAATACAGGGGAAT | AGGAAT | CAUUUAUAAUACAGGGGAAU |
| (g7) | (SEQ ID NO: 48) | (SEQ ID | (SEQ ID NO: 83) |
| | | NO: 89) | |
| g21 | GTCATTTATAATACAGGGGAA | AGGAAT | GUCAUUUAUAAUACAGGGGAA |
| (g7) | T | (SEQ ID | U |
| | (SEQ ID NO: 49) | NO: 89) | (SEQ ID NO: 84) |
| g22 | AGTCATTTATAATACAGGGGA | AGGAAT | AGUCAUUUAUAAUACAGGGGA |
| (g7) | AT | (SEQ ID | AU |
| | (SEQ ID NO: 50) | NO: 89) | (SEQ ID NO: 85) |
| g23 | GCACTACCAGAGCTAACTCA | | GCACUACCAGAGCUAACUCA |
| | (SEQ ID NO: 51) | | (SEQ ID NO: 86) |

TABLE 2
Primer sequences.

| Description | Forward Primer (5′-3′) |
|---|---|
| Surveyor | Fwd: CTGATGCTCTCCAAACTTGCC (SEQ ID NO: 98) |
| (g1, g5, g6) | Rev: TGCTTTGTGTGTCCCATGCT (SEQ ID NO: 99) |
| Surveyor | Fwd: ATACCTCTGAGATTGTGGTCCT (SEQ ID NO: 100) |
| (g2, g3, g4) | Rev: TGGGCAGCGGTAATGAGTTC (SEQ ID NO: 101) |
| Surveyor | Fwd: TTACTGAGTTTTAGAACCAGAGCTA (SEQ ID NO: 102) |
| (g7, g8) | Rev: AGGGTTCTTCAGCGTTGTGT (SEQ ID NO: 103) |
| Surveyor | Fwd: AGCAGGAGTCAAAGTACAGAGT (SEQ ID NO: 104) |
| (g9, g10) | Rev: TCCGGAGTACCTCGGATTAC (SEQ ID NO: 105) |
| gDNA integration | Fwd: TTACTGAGTTTTAGAACCAGAGCTA (SEQ ID NO: 106) |
| PCR | Rev: GAGTTCTTCCAACTGGGGAC (SEQ ID NO: 107) |
| CDNA integration | Fwd: CTGACCACTATTGGAGCCTCTC (SEQ ID NO: 108) |
| PCR | Rev: GAGTTCTTCCAACTGGGGAC (SEQ ID NO: 109) |
| 3′ RACE GSP | GTAGTCGTTTAAACCGCTGATCAGCCTCG (SEQ ID NO: 110) |
| ddPCR - Corrected | Fwd: GCTTTCTCTGCTTGATCAAG (SEQ ID NO: 111) |
| (Ex51-Ex52 junction) | Rev: GAGTTCTTCCAACTGGGGAC (SEQ ID NO: 112) |
| | Probe: GCAACAATGCAGGATTTG (SEQ ID NO: 113) |
| ddPCR - Unedited | Fwd: GCTTTCTCTGCTTGATCAAG (SEQ ID NO: 114) |
| (Ex51-Ex53 junction) | Rev: CGGTTCTGAAGGTGTTCTTGTA (SEQ ID NO: 115) |
| | Probe: AGCAGAAGTTGAAAG (SEQ ID NO: 116) |
| ddPCR - | Fwd: GATGAGCTGGACCTCAAGCT (SEQ ID NO: 117) |
| Normalization | Rev: GTGGCTCACGTTCTCTTTCA (SEQ ID NO: 118) |
| (Ex59-Ex60 junction) | Probe: CGAGAAAGTCAAGGCACT (SEQ ID NO: 119) |
| Tn5-Top | CAAGCAGAAGACGGCATACGAGATNNNNNNNNNNGTCTCGTGGG |
| | CTCGGAGATGTGTATAAGAGACAG (SEQ ID NO: 120) |
| Tn5-Bottom | [Phos]CTGTCTCTTATACACATCT (SEQ ID NO: 121) |
| Tn5-GSP (g7) | AAGCAGTGGTATCAACGCAGAGTACCAGAGAAAATAGACACTGA |
| | AGAAAGGG (SEQ ID NO: 122) |
| Tn5-GSP (g12) | AAGCAGTGGTATCAACGCAGAGTACCCTTAATTTTGACGTCACAC |
| | AGAATG (SEQ ID NO: 123) |
| Tn5-Universal | CAAGCAGAAGACGGCATACGAGAT (SEQ ID NO: 124) |
| Tn5-BC, [i5 barcode] | AATGATACGGCGACCACCGAGATCTACAC[NNNNNN]CGGAAGCA |
| | GTGGTATCAACGCAGAGTAC (SEQ ID NO: 125) |
| Tn5-Read1 | CGGAAGCAGTGGTATCAACGCAGAGTAC (SEQ ID NO: 126) |
| (Miseq/Novaseq) | |
| Tn5-Index1 | GTACTCTGCGTTGATACCACTGCTTCCG (SEQ ID NO: 127) |
| (Novaseq) | |

[0174] Animals. All experiments involving animals were conducted with strict adherence to the guidelines for the care and use of laboratory animals of the National Institutes of Health (NIH). All experiments were approved by the Institutional Animal Care and Use Committee (IACUC) at Duke University. The hDMD/mdx mouse (t Hoen, P. A., et al. J. Biol. Chem. 2008, 283, 5899-5907) was kindly provided by Leiden University Medical Center. The generation of the hDMDΔ52/mdx mouse was completed by the Duke Transgenic Mouse Facility. Briefly, B6SJLF1/J donor females were superovulated by intraperitoneal injection of 5IU PMSG on day one and 5IU HCG on day three, followed by mating with fertile hDMD/mdx males. On day four, embryos were harvested and injected with mRNA encoding S. pyogenes Cas9 and gRNAs targeting human intron 51 (CTCTGATAACCCAGCTGTGTGTT, SEQ ID NO: 96) and human intron 52 (CTAGACCATTTCCCACCAGTTCT; SEQ ID NO: 97). Injected embryos were implanted into pseudo-pregnant CD1 female mice. Genomic DNA was extracted from ear punches of chimeric pups using the DNeasy Blood and Tissue Kit (Qiagen) and screened for presence or deletion of exon 52. Mice with loss of exon 52 were bred with mdx mice. The resulting male hDMDΔ52/mdx (het;hemi) mice were used for experiments.

[0175] In Vitro AAV Transductions. Primary myoblasts were isolated from the tibialis anterior (TA) and gastrocnemius muscles of hDMDΔ52/mdx mice, as previously described (Springer, M. L., Rando, T. A. & Blau, H. M. Gene delivery to muscle. Curr. Protoc. Hum. Genet. Chapter 13, Unit13.14), and maintained in F10 media (Invitrogen) supplemented with 20% FBS, 5 ng/mL bFGF, and 1% P/S. Cells were grown on plates coated with bovine type I collagen (Sigma) and incubated at 37° C. with 5% CO₂. For transductions, cells were plated for 1.5 hours then AAV2-SaCas9 and AAV2-gRNA-donor vectors were combined, added to the plates at an MOI of 1×10⁶ total vectors per cell. Cells were immediately spun at 3000×g for 5 min and returned to the incubator. Once cells reached 70% confluency, the media was changed to DMEM supplemented with 5% horse serum and 1% P/S and replaced every 2 days for differentiation into myofibers. Cells were differentiated for 10 days and processed for analysis of genomic DNA, total RNA, and protein as described.

[0176] Genomic DNA and RNA Analysis from Primary hDMDΔ52/mdx Myoblasts. Genomic DNA was isolated using the DNeasy kit (Qiagen) according to the manufacturer's protocol. Total RNA was isolated using QIAshredder and RNeasy Plus kits (Qiagen). First-strand cDNA synthesis was performed using 500 ng total RNA per sample using the SuperScript VILO Reverse Transcription Kit (Invitrogen) and incubated at 25° C. for 10 min, 42° C. for 2 hours, and 85° C. for 5 min. Donor integration was detected by PCR (Primers provided in TABLE 2) using the Invitrogen AccuPrime High Fidelity PCR kit according to the manufacturer's protocol and electrophoresed on 1% agarose gels. 3′ RACE was carried out on RNA samples using the SMARTer RACE 5′/3′ kit (Takara) for cDNA synthesis and primary PCR (Primers provided in TABLE 2) using Program 1 according to the manufacturer's instructions.

[0177] In Vivo AAV Administration. Adult 6-8 week-old mice were administered AAV by intramuscular injection into the tibialis anterior muscle with 40 μL PBS or AAV vector per mouse. For the donor comparative study, 1.56e12 total vg was administered to 1:1 treatment groups (7.81e11 AAV-Cas9 and 7.81e11 AAV-donor) and 2.13e12 total vg was administered to 1:5 treatment groups (3.55e11 AAV-Cas9 and 1.77e12 AAV-donor). For the gRNA comparative study, 8.64e11 total vg was administered to the 1:1 treatment groups (4.32e11 AAV-Cas9 and 4.32e11 AAV-donor) and 7.00e11 total vg was administered to the 1:5 treatment groups (1.17e11 AAV-Cas9 and 5.83e11 AAV-donor). Two-day-old (P2) neonatal mice were administered AAV by intravenous injection through the facial vein (Gombash Lampe, et al. J. Vis. Exp. 2014, e52037) with 40 μL AAV vector per mouse. For the 1:1 treatment groups, 8.64e11 total vg was administered (4.32e11 AAV-Cas9 and 4.32e11 AAV-donor) and for the 1:5 treatment groups, 7.00e11 total vg was administered (1.17e11 AAV-Cas9 and 5.83e11 AAV-donor). At set time points, mice were euthanized and skeletal muscle, cardiac muscle, and serum was collected.

[0178] Droplet Digital PCR. Quantitative ddPCR was performed on cDNA and gDNA samples using the WX200 Droplet Digital PCR system according to the manufacturer's instructions. To quantify corrected transcript levels, RNA was extracted from mouse tissues using the Qiagen Universal kit. Subsequently, First-strand cDNA synthesis was performed using 500 ng total RNA per sample as stated above. Corrected hDMD transcripts containing exon 52 were detected using the QX200 ddPCR Supermix for Probes without dUTP (BioRad) and Taqman assays with probes (TABLE 2) designed to bind to the human dystrophin Ex51-52 junction (corrected, ThermoFisher custom assay ID: AP2XDZ9), human dystrophin Ex51-53 junction (unedited, ThermoFisher custom assay ID: AP327K6), and human dystrophin Ex59-60 (input normalization, ThermoFisher custom assay ID: AP47Z63). Quantification was determined based on the number of positive droplets in each reaction using QuantaSoft Analysis software (BioRad). cDNA input for corrected or unedited transcript levels was normalized by dividing the number of Ex51-52 or Ex51-53 of positive droplets, respectively, by the number of positive Ex59-60 droplets in each reaction. The percentage of corrected transcripts was calculated as (Normalized Ex51-52)/[(Normalized Ex51-52)+(Normalized Ex51-53)]×100. For vector genome quantification, gDNA was extracted from mouse tissues using the Qiagen DNeasy kit and digested with HindIII-HF at 37° C. for 1 hour. Episomes were detected using the QX200 ddPCR Supermix for Probes without dUTP (BioRad) and BioRad assays with probes (TABLE 2) designed to bind SaCas9 (AAV-SaCas9, BioRad unique assay ID: dCNS159380965), U6 (AAV-gRNA-donor, BioRad unique assay ID: dCNS116676529), and mouse EEF2 (input normalization, BioRad unique assay ID: dMmuCNS781688813). Quantification was determined based on the number of positive droplets in each reaction using QuantaSoft Analysis software. Episome quantification was calculated as viral genomes per diploid genome (vg/dg) by dividing the number of SaCas9 or U6 positive droplets by the number of mouse EEF2 positive droplets in the corresponding reaction.

[0179] Transposon-mediated target enrichment and sequencing. Tn5 transposase protein was expressed and purified as previously described (Picelli, S., et al. Genome Res. 2014, 24, 2033-2040). Tagmentation of genomic DNA was completed as previously described (Giannoukos, G., et al. BMC Genomics 2018, 19, 212), with the following modifications to include unique molecular indexes (UMIs). For RNA transcript analysis, first-strand cDNA synthesis was performed using 500 ng total RNA per sample as stated above. Second-strand synthesis was performed using Kenow fragment DNA polymerase (NEB) and purified using Ampure beads (Beckman Coulter) at 1.8×. All primer sequences are provided in TABLE 2. In brief, the linker oligonucleotides (Tn5-Top contains Illumina i7 adapter sequence and 10 nucleotide UMI, Tn5-Bottom contains Tn5-ME sequence) were annealed and assembled on Tn5. Genomic DNA was quantified using NanoDrop (ThermoFisher) and second-strand products were quantified using Qubit Fluorometric Quantification (ThermoFisher). Tagmentation of 200 ng genomic DNA or second-strand products was performed using a 1:40 dilution of assembled Tn5 and purified using DNA Clean and Concentrator-5 columns or 96-well kits (Zymo). To enrich the targeted sequence, first round PCR using a genome specific primer (Tn5-GSP, contains custom adapter) was used with a reverse primer (Tn5-Universal) specific for the i7 adapter sequence inserted by the transposon for 25 cycles. Amplicons were purified with Ampure beads at 1.8×. Second round PCR using a barcode primer (Tn5-BC) specific for the custom adapter sequence was used to add 6-nucleotide experimental barcodes and the Illumina i5 adapter was used with the Tn5-Universal reverse primer for 15 cycles. Amplicons were gel-purified, followed by purification with Ampure beads at 0.6× to select for fragment sizes greater than 250 bp. Sequencing was conducted on an Illumina Miseq using 250/50-cycle paired-end reads with a custom read 1 primer (Tn5-Read1) or on an Illumina Novaseq v1.5 using 300-cycle single-end reads with a custom read 1 primer (Tn5-Read1) and custom index 1 primer (Tn5-Index1). The Tn5-based method is expected to reduce PCR-related bias from amplicon size; however, some bias may remain from the transposition selectivity (Giannoukos, G., et al. BMC Genomics 2018, 19, 212). Briefly, the analysis steps are as follows: Demultiplex. Demultiplex fastq files using the list of barcodes for each sample. Trim. Remove the 3′ adapters and low-quality bases using Trimmomatic. Alignment and deduplication. Using bwa-mem, align the reads to reference genomes (gDNA aligned to mouse genome (GRCm38)+human DMD; cDNA aligned to human dystrophin cDNA) with PCR duplicates marked using Picard MarkDuplicates and removed. Alignment to reference bin sequences. Build reference amplicons to align to the targeted locus and expected edits. To remove reads that are due to false priming, filter out reads that do not contain the 20 bases directly adjacent to the GSP expected sequence. To remove reads that do not extend far enough past the edit site, filter out reads that are shorter than the required minimum length for binning. Align on-site deduplicated reads to reference amplicons using bwa-mem. Identify reads where there is an indel ±15 bp at the expected cute site or junction. The number of distinct UMIs were counted for each edit.

[0180] Western blot. Protein was isolated from muscle tissues by disruption with a BioMasher II Micro Tissue Homogenizer (VWR) in RIPA buffer (Sigma) with a protease inhibitor cocktail (Roche) and incubated for 30 minutes on ice with intermittent vortexing. Samples were spun at 16,000×g at 4° C. for 30 minutes and supernatant was collected. Total protein was quantified using the BCA Protein assay kit (Pierce) according to the manufacturer's protocol and measured on a BioTek Synergy 2 Multi-Mode Microplate Reader. S ample was mixed with NuPAGE loading buffer (Invitrogen) and 5% β-mercaptoethanol, and 3.125 μg of hDMD/mdx protein or 25 μg of all other protein samples was heated at 100° C. for 10 min. Samples were loaded into 4-12% NuPAGE Bis-Tris gels (Invitrogen) with MES buffer (Invitrogen) and electrophoresed for 45 min at 200V on ice. Protein was transferred to nitrocellulose membranes for 90 minutes in 1× tris-glycine transfer buffer with 0.01% SDS at 4° C. at 400 mA. The blot was blocked in 5% milk-TBST (50 mM Tris, 150 mM NaCl and 0.1% Tween-20) at 4° C. overnight. Blots were cut and incubated with anti-MANDYS106 (1:50 dilution, Millipore clone 2C6), anti-HA (1:1000 dilution, Biolegend clone 16B12, or anti-GAPDH (1:5000 dilution, Cell Signaling clone 14C10) in 5% milk-TBST at room temperature for 1 hour. Blots were then washed in TBS-T and incubated with goat anti-mouse-conjugated horseradish peroxidase (1:2500 dilution, Sigma) or goat anti-rabbit-conjugated horseradish peroxidase (1:2500 dilution, Sigma) in 5% milk-TBS-T at room temperature for 1 hour. Blots were washed in TBST then visualized using Western-C ECL substrate (Bio-Rad) on a ChemiDoc XRS+ System (Bio-Rad).

[0181] Histological analysis. Muscles were dissected and embedded in OCT or flash-frozen using liquid nitrogen-cooled isopentane. Subsequently, 10 μm sections were cut onto pretreated histological slides using a cryostat (Leica). Slides were washed in PBS and blocked in PBS supplemented with 5% BSA, and 0.1% Triton X-100. Slides were stained with mouse anti-MANDYS106 (1:200 dilution, Millipore clone 2C6) and rabbit anti-Laminin (1:300 dilution, Sigma L9393) in blocking buffer at room temperature for 1 hour. Slides were washed 3× with PBS for 5 minutes and goat anti-mouse IgG2a, Alexa Fluor 594 (1:500 dilution, ThermoFisher A-21135) or goat anti-rabbit IgG (H+L), Alexa Fluor 488 (1:500 dilution, ThermoFisher A-11034) was applied with DAPI (1:1000 dilution) at room temperature for 1 hour. Slides were washed and mounted with ProLong Gold Antifade Mountant (Invitrogen) and imaged with a Zeiss AxioObserve 7 microscope. Total fibers (anti-Laminin) were counted using the analyze particles function on ImageJ (Schindelin, J., et al. Nat. Methods 2012, 9, 676-682) and human dystrophin-positive fibers (anti-MANDYS106) were manually counted from a series of 5 randomized images for each sample. Percent dystrophin-positive fibers were calculated as dystrophin-positive fibers divided by the total fibers for each image. P-values were calculated by nested global one-way ANOVA with Tukey post hoc multiple comparisons tests.

[0182] Off-target analysis. CIRCLE-seq libraries (Tsai, S. Q., et al. Nat. Methods 2017, 14, 607-614) were generated as previously described (Kocak, D. D., et al. Nat. Biotechnol 2019, 37, 657-666). Approximately 50-100 μg of HEK293T gDNA was used to generate circles for each reaction. Using a Diagenode Bioruptor XL sonicator at 4° C., gDNA was sonicated to an average size of approximately 50 bp, with a visible range of 200-1000 bp, as determined by agarose gel electrophoresis. The enzymatic procedure to generate circles was carried out as previously described (Tsai, S. Q., et al. Nat. Methods 2017, 14, 607-614). For the in vitro digest of the circles, gRNAs were synthesized from IDT and SaCas9 was purchased from Applied Biological Materials. Library production was carried out as previously described for CHANGE-seq (Lazzarotto, C. R., et al. Nat. Biotechnol. 2020, 38, 1317-1327). Libraries were quantified by the qPCR-based KAPA Library Quantification Kit (KAPA Biosystems), pooled, and sequenced with 150-bp paired-end reads on an Illumina NextSeq instrument. Read counts were obtained using previously described methods and software for CHANGE-seq (Lazzarotto, C. R., et al. Nat. Biotechnol. 2020, 38, 1317-1327). The following parameters were used for running the analysis pipeline: read threshold of 4, window size of 3, mapq threshold of 50, start threshold of 1, gap threshold of 3, mismatch threshold of 6, and PAM of NNGRRN (SEQ ID NO: 8; Ran, F. A., et al. Nature 2015, 520, 186-191).

[0183] Creatine kinase assay. Serum creatine kinase was measured using a Liquid Creatine Kinase Reagent set (Pointe Scientific) following the manufacturer's instructions. In brief, 5 μL of serum was diluted in 45 μL sterile PBS and incubated with reagent for 2 min at 37° C. followed by absorbance measurements taken every minute three readings using a nanodrop spectrophotometer set for 340 nm readings. Calculations for total creatine kinase in U/L were made according to the manufacturer's instructions.

[0184] Statistical analysis. All data was analyzed with four to six biological replicates and presented as mean±SEM. All p-values were calculated by global one-way ANOVA with Tukey post hoc tests (α=0.05).

### Example 2

### Correction Strategy for Humanized Mouse Model of DMD

[0185] The hDMD/mdx mouse lacks mouse dystrophin due to the hallmark mdx mutation but produces human dystrophin from the full-length human DMD (hDMD) gene on mouse chromosome 5. These mice can be used to generate humanized DMD mouse models by removing hDMD exons known to be missing in patient populations, and thus eliminating all dystrophin expression. Importantly, these humanized models can be used to test therapeutic strategies because human dystrophin restoration can functionally compensate for the lack of mouse dystrophin. To study various gene editing therapeutic strategies, a hDMDΔ52/mdx mouse model was generated by delivering Streptococcus pyogenes Cas9 (SpCas9) and gRNAs to hDMD/mdx zygotes for targeted exon 52 deletion from the hDMD gene. Deletion of exon 52 results in an out-of-frame mutation (FIG. 3A) that creates a premature stop codon and subsequent loss of dystrophin expression. To restore full-length dystrophin expression, a HITI-based approach was developed to insert exon 52 at its corresponding position in the hDMD gene in this humanized hDMDΔ52/mdx mouse model. This dual AAV vector approach includes one AAV vector that encodes a Staphyloccocus aureus Cas9 (SaCas9) (Ran, F. A., et al. Nature 2015, 520, 186-191) expression cassette and a second AAV vector that encodes a gRNA expression cassette with the exon 52 donor sequence (Ex52) flanked by the same gRNA target site found in intron 51 of the hDMD gene. Following co-delivery of both AAV vectors, Cas9 and the gRNA was expressed and created a DSB at the genomic target site, as well as liberated the Ex52 donor sequence from the AAV vector so that following NHEJ-based repair, the exon 52 sequence integrated into the target site and restore a full-length dystrophin gene. The gRNA target sites were in opposite orientation in the genomic DNA and AAV vector so that correct donor integration disrupted the gRNA target sequence and prohibited further Cas9-based editing (FIG. 3A).

### Example 3

### Screening and Validation of HITI-Mediated Integration

[0186] The specificity of DNA cleavage by the CRISPR-Cas9 system is critical to ensuring the safety and efficacy of this approach. To minimize potential off-target effects, bioinformatic analysis was used to design gRNAs with limited predicted off-target sites in murine and human genomes. A panel of SaCas9 gRNAs targeting intron 51 (FIG. 8A, TABLE 1) was screened to identify targets with high specificity and activity, initially using the Surveyor assay following plasmid transfection of HEK293T cells (FIG. 8B). SaCas9 activity can vary across a range of spacer lengths, therefore 19-23 nt spacers of the top gRNAs were generated and individually screened for activity by Surveyor assay, following plasmid electroporation into DMD patient myoblasts (FIG. 8C). The individual gRNA sequences with the highest activity levels and fewest predicted off-target sites (g12 and g7), along with a scrambled non-target control gRNA (gScbI), were cloned into AAV vector plasmids for gRNA expression and the corresponding spacer and PAM target sequences were included flanking the donor sequence.

[0187] To validate targeted integration of the Ex52 donor sequence, primary myoblasts were isolated from hDMDΔ52/mdx skeletal muscle (FIG. 3B). Following electroporation of AAV plasmids, targeted Ex52 integration in genomic DNA (gDNA) was confirmed by Sanger sequencing of the PCR amplified genome-donor junction for g12-Ex52 and g7-Ex52 treated hDMDΔ52/mdx primary myoblasts, but not gScbI-treated cells (FIG. 8D). To validate AAV-mediated targeted integration and subsequent correction of dystrophin transcripts and protein restoration, primary myoblasts were transduced with AAV2 and then cultured the cells in differentiation conditions to upregulate dystrophin expression (FIG. 3B). In addition to delivering both AAV2 constructs at equal doses (1:1), delivery of 5× more AAV-donor than AAV-Cas9 (1:5) was also tested. Total volume of AAV preps remained consistent for 1:1 and 1:5 treatment groups, resulting in delivery of more AAV-Cas9 viral genomes for the 1:1 treatment group. Using both delivery ratios, targeted Ex52 integration was confirmed in gDNA by PCR amplification of the genome-donor junction (FIG. 3C). The presence of a larger amplicon was detected, which was confirmed to be intact AAV-donor integration by Sanger sequencing (data not shown). Additionally, the presence of Ex52 was observed in dystrophin cDNA following PCR amplification (FIG. 3D) and resulted in dystrophin protein restoration (FIG. 3E). The higher Cas9 expression observed in 1:1 treated cells correlated with the higher AAV-Cas9 viral dose. These results confirm activity of the AAV-Cas9-based strategy for targeted Ex52 integration and full-length dystrophin protein restoration.

### Example 4

### AAV-Cas9 Exon 52 Integration Restores Full-Length Dystrophin In Vivo

[0188] AAV9 was used for delivery of the CRISPR-Cas system to hDMDΔ52/mdx mouse skeletal and cardiac muscle. Following co-injection of the two AAV vectors into the tibialis anterior (TA) muscle of adult hDMDΔ52/mdx male mice (FIG. 4A), local AAV vector delivery at comparable levels was confirmed for both g12 and g7 vectors by digital droplet PCR (ddPCR) of DNA vector genomes (FIG. 4B). Targeted Ex52 integration was confirmed in gDNA from TA tissue by PCR amplification of the genome-donor junction using both AAV delivery ratios and intact AAV-donor integration (FIG. 4C). To quantify editing activity and comprehensively map possible genome editing outcomes with an unbiased approach, Tn5-transposon-based library preparation methods (Nelson, C. E., et al. Nat. Med. 2019; Giannoukos, G., et al. BMC Genomics 2018, 19, 212) were adapted and included unique molecular identifiers (UMI) to remove PCR duplicates for increased accuracy of quantifying rare events. The Tn5-based method eliminated PCR biases associated with target specificity and amplicon length by using a single genome-specific primer (GSP) adjacent to a gRNA cut site in combination with a transposon-specific primer for the Tn5-integrated DNA tag. In addition to quantifying donor integrations in the correct orientation, genome editing events were measured that included indels, donor inversion integrations, and AAV-ITR integrations (FIG. 4D). Higher correction and total genomic editing events were measured in g7 treated mice (FIG. 4E, FIG. 4F, FIG. 9A, and FIG. 9B), however indel and AAV integration edits were also observed in g12 treated mice (FIG. 4E, FIG. 9A, and FIG. 9B). Although corrected genomic reads were not detected in g12 treated mice, the presence of exon 52 was observed in corrected dystrophin cDNA following PCR amplification (FIG. 4G) and quantified by ddPCR (FIG. 4H) for all treatment groups. Full-length dystrophin restoration was confirmed by Western blot of whole TA tissue lysates (FIG. 4I) and dystrophin positive fibers were quantified by immunofluorescence (IF) (FIG. 4J). These results confirmed in vivo activity of the AAV-Cas9-based strategy for targeted Ex52 integration and full-length dystrophin protein restoration following local injection in hDMDΔ52/mdx mouse skeletal muscle.

[0189] Assessing CRISPR-Cas targeting specificity may be important for pre-clinical development. Collectively, greater genome editing activity and subsequent dystrophin restoration was measured for g7-treated mice (FIG. 3A-3F), thus the specificity analyses were focused on g7. To empirically determine the top g7 off-target sites in the human genome with an unbiased genome-wide assay, high-throughput genome-wide editing quantification was performed (Tsai, S. Q., et al. Nat. Methods 2017, 14, 607-614; Lazzarotto, C. R., et al. Nat. Biotechnol. 2020, 38, 1317-1327) (FIG. 10). These analyses identified 6 potential off-target sites with editing activity≤1.07% of on-target gDNA editing, confirming high specificity of this g7 gRNA. For the remainder of the work, g7-targeted full-length dystrophin restoration strategies were focused on.

### Example 5

### In Vitro Validation of AAV-Cas9 Superexon Strategy for Full-Length Dystrophin Restoration

[0190] The g7-Ex52 integration approach can correct full-length dystrophin for Δ52 DMD patients and restore the proper reading frame to produce a truncated dystrophin protein for Δ52-58, Δ52-61, and Δ52-76 patient mutations. To expand the full-length dystrophin correction strategy to treat any genetic mutation downstream of exon 51, an AAV-superexon donor vector was engineered. This superexon encoded the complete dystrophin cDNA coding sequence downstream of exon 51, including exons 52 through 79. Additionally, the stop codon was replaced with a 3× stop to ensure translation termination in all reading frames, included the SV40 polyA sequence, and flanked the donor cassette with the previously validated g7 target sites (FIG. 5A). Targeted integration of this g7-superexon construct could correct full-length dystrophin in >20% of all DMD patients.

[0191] To validate superexon integration and subsequent correction of dystrophin transcripts and protein restoration, primary myoblasts were transduced with AAV2 at 1:1 and 1:5 vector ratios, then the cells were cultured in differentiation conditions to upregulate dystrophin expression (FIG. 5B). Targeted integration was confirmed in gDNA by PCR amplification of the genome-donor junction for all treated samples, in addition to detection of intact AAV-donor integration (FIG. 5C). The presence of exon 52 from both donors was observed at comparable levels in dystrophin cDNA following PCR amplification (FIG. 5D). For wild-type dystrophin transcripts, almost 2.7 kb of untranslated region (3′ UTR) was included in exon 79 following the stop codon. In the superexon donor, this sequence was replaced with a shortened polyA signal due to the packaging size restrictions of AAV (˜4.7kb). To characterize this engineered 3′ UTR, 3′ RACE was performed using cDNA of AAV-transduced cells and superexon-corrected dystrophin transcripts were amplified using a GSP that recognizes the engineered 3× stop (FIG. 5E). Following Sanger sequencing, addition of a polyA tail was observed within the SV40 polyA signal sequence. Next, it was confirmed that superexon-corrected dystrophin transcripts resulted in dystrophin protein restoration (FIG. 5F). These results confirmed activity of the targeted AAV-Cas9-based Ex52-79 superexon integration strategy for full-length dystrophin protein restoration.

### Example 6

### AAV-Cas9 Superexon Strategy Restores Full-Length Dystrophin in Skeletal Muscle and Cardiac Muscle

[0192] To test the Superexon strategy in vivo, the AAV9 constructs were co-injected at a ratio of 1:1 and 1:5 into the TA muscle of adult hDMDΔ52/mdx male mice (FIG. 6A). A scrambled non-target gRNA donor (gScbI-Ex52) was included as an additional control. At 8 weeks post-injection, equivalent AAV vector genome levels between treatment groups were measured by ddPCR (FIG. 6B). Targeted editing activity was quantified using Tn5-based library preparation and analysis methods with the highest editing levels in the 1:5 treated mice. The lower g7-Ex52 editing levels observed in this donor comparative study (FIG. 6C and FIG. 11A-11B), in contrast to the previous gRNA comparative study (FIG. 4E and FIG. 9A-9B), was likely due to lower AAV transduction in the TA as demonstrated by differences in vector genome quantification (FIG. 4B and FIG. 6B). Although corrected gDNA levels were not detected above background by Tn5 analysis, an increase in the percent of corrected transcripts was observed for all treatment groups (FIG. 6D). Additionally, full-length dystrophin expression was observed by Western blot (FIG. 6E) and IF (FIG. 6F) and quantification of dystrophin positive fibers resulted in a significant increase for g7-Ex52 treated mice compared to the scrambled non-targeted donor control. These results confirmed in vivo activity of the AAV-Cas9-based strategy for targeted superexon integration and full-length dystrophin protein restoration following local injection in hDMDΔ52/mdx mouse skeletal muscle.

[0193] Next, the corrective therapeutic potential of these integration strategies was evaluated following systemic delivery. For transduction of cardiac and skeletal muscle, the AAV9 constructs were co-delivered at a ratio of 1:1 and 1:5 by facial vein injection of P2 neonate hDMDΔ52/mdx male mice (FIG. 7A). At 8 weeks post-injection, vector genome quantification by ddPCR revealed higher transduction levels in cardiac tissue than skeletal (diaphragm and TA) tissues (FIG. 7B), suggesting the potential for higher editing activity in hearts of treated mice. Indeed, Tn5-based quantification revealed higher editing for all quantified outcomes in the heart gDNA compared to diaphragm and TA, with the highest on-target correction in hearts of g7-Superexon treatment groups (FIG. 7C and FIG. 12A-12B). Higher levels of corrected dystrophin transcripts were observed in hearts of g7-Superexon treatment groups with mice achieving >25% corrected transcripts (FIG. 7D). The ddPCR-based transcript quantification was limited to detection of unedited (Ex51-Ex53 junction) and corrected (Ex51-Ex52 junction) cDNA molecules. For additional heart transcript characterization, putative aberrant splicing events were measured that included inversion donor integrations, splicing with the SaCas9 coding sequence, circular RNA formation (exons 1-51), multi-exon skipping (exons 53-79), and alternative splicing with downstream intronic sequences (introns 51-53) (FIG. 7E). Higher levels of editing were measured by ddPCR than Tn5-based deep sequencing strategies. Lower deep sequencing editing percentages may be attributed by larger denominators generated from measuring unintended gene editing outcomes. For cDNA analysis, the high-throughput deep sequencing characterization revealed considerable aberrant splicing with the SaCas9 coding sequence in two treated mice (FIG. 13A). Upon further investigation, genomic integration of aligned sequences in corresponding genomic mouse samples was confirmed (FIG. 13B). Transcript isoforms that contain partial AAV genomes, including partial SaCas9 coding sequences, have an unknown biological effect and could be investigated in future studies. In heart tissue, full-length dystrophin restoration was confirmed by Western blot (FIG. 7F) and dystrophin-positive cells were detected in all treated mice (FIG. 7G and FIG. 14). A significant increase in dystrophin-positive cells was observed for g7-superexon (1:1) treated mice compared to the scrambled non-targeted gRNA donor control, with almost 50% of dystrophin-positive cells observed for one mouse. Serum creatine kinase levels, a marker of muscle degeneration, were significantly higher for control hDMDΔ52/mdx mice compared to hDMD/mdx mice, suggestive of a diseased DMD phenotype (FIG. 7H). Additionally, serum creatine kinase levels were reduced in hDMDΔ52/mdx mice after all systemic treatments, demonstrating protection from muscle damage by the restored full-length dystrophin protein.

### Example 7

### Discussion

[0194] DMD gene therapy strategies have been explored for nearly 30 years, however strategies to correct full-length dystrophin are lacking. In this study, use of targeted HITI-mediated transgene insertion was demonstrated for full-length human dystrophin correction and restoration in hDMDΔ52/mdx mice. A dual AAV delivery system was used for generating a Cas9-targeted genomic DSB and delivering donor sequences for NHEJ-mediated integration at the cut site. Here, the therapeutic potential of NHEJ-mediated integration approaches following both local injection and systemic delivery in skeletal and cardiac tissues was demonstrated. Additionally, high-throughput unbiased sequencing was performed to characterize and quantify genomic and transcriptional editing events.

[0195] Although downstream consequences of HITI-mediated correction resulted in dystrophin protein restoration, the deep sequencing results demonstrate low genomic correction efficiency. The observation of high dystrophin protein restoration resulting from low genomic editing efficiency is consistent with alternative DMD gene editing approaches. While low levels of dystrophin expression, even less than 4% of normal, can result in potential therapeutic benefit, improving HITI efficiency will aid translation of knock-in gene therapy strategies to clinical applications. The gene editing strategy detailed herein may be similar to other gene transfer strategies in its need for robust delivery to targeted tissues and cells. Methods to improve AAV-mediated tissue-specific transduction and expression, such as AAV capsid evolution and promoter engineering, may improve gene editing activity and therapeutic potential. Additionally, targeted integration in dividing and non-dividing cells may be increased by identification of NHEJ regulators leading to the development of small molecule targets for enhancing HITI-mediated activity. Alternatively, other targeted gene knock-in methods can be explored including microhomology-mediated end-joining (MMEJ), Precise Integration into Target Chromosome (PiTCh), homology-mediated end joining (HMEJ), and intercellular linearized Single homology Arm donor mediated intron-Targeting Integration (SATI). With continued progress in editing efficiency, HITI-mediated transgene knock-in holds great promise for future development of corrective gene therapy strategies.

[0196] Pre-clinical gene editing studies may benefit from use of humanized mouse models because they permit testing of therapeutic approaches specifically designed to treat human patients. To apply HITI-based gene therapy strategies to a DMD disease model that recapitulates mutations found in patients, hDMDΔ52/mdx mice were utilized, which contain a gene deletion in the DMD patient mutational hotspot of exons 45-55. Full-length protein restoration was demonstrated following targeted integration of the missing exon 52 coding sequence. To expand this corrective gene therapy approach to a larger patient population (>20%), a superexon encoding the complete human dystrophin cDNA coding sequence downstream of exon 51 was engineered that can correct all patient mutations located after exon 51, and demonstrated full-length protein restoration using this approach. This work is the first demonstration of a targeted gene editing approach to permanently correct full-length dystrophin. This approach will be extended to all patients with mutations within and downstream of the exon 45-55 hotspot (>50% of all patients), for example, with a dual AAV-based system with one AAV that encodes SaCas9 and a gRNA targeting intron 44, and a second donor AAV vector that contains the human dystrophin cDNA coding sequence downstream of exon 44 (exons 45-79). Sequences for gRNAs targeting intron 44 are shown in TABLE 3. Exons 45-79 of the human dystrophin gene may be encoded by a polynucleotide of SEQ ID NO: 154, and an example of a donor sequence for insertion of exons 45-79 is shown in SEQ ID NO: 155.

TABLE 3
Examples of gRNAs targeting intron 44 of human
dystrophin gene.

| DNA encoding gRNA | gRNA |
|---|---|
| GGGGCTCCACCCTCACGAGT | GGGGCUCCACCCUCACGAGU |
| (SEQ ID NO: 157) | (SEQ ID NO: 171) |
| GCACAAAAGTCAAATCGGAA | GCACAAAAGUCAAAUCGGAA |
| (SEQ ID NO: 158) | (SEQ ID NO: 172) |
| GATTTCAATATAAGATTCGG | GAUUUCAAUAUAAGAUUCGG |
| (SEQ ID NO: 159) | (SEQ ID NO: 173) |
| GTGAGGGCTCCACCCTCACGA | GUGAGGGCUCCACCCUCACGA |
| (SEQ ID NO: 160) | (SEQ ID NO: 174) |
| GAAGGATTGAGGGCTCCACCC | GAAGGAUUGAGGGCUCCACCC |
| (SEQ ID NO: 161) | (SEQ ID NO: 175) |
| GGCTCCACCCTCACGAGTGGG | GGCUCCACCCUCACGAGUGGG |
| (SEQ ID NO: 162) | (SEQ ID NO: 176) |
| GTGAGGGCTCCACCCTCACGA | GUGAGGGCUCCACCCUCACGA |
| (SEQ ID NO: 163) | (SEQ ID NO: 177) |
| GGGCTCCACCCTCACGAGT | GGGCUCCACCCUCACGAGU |
| (SEQ ID NO: 164) | (SEQ ID NO: 178) |
| CACAAAAGTCAAATCGGAA | CACAAAAGUCAAAUCGGAA |
| (SEQ ID NO: 165) | (SEQ ID NO: 179) |
| ATTTCAATATAAGATTCGG | AUUUCAAUAUAAGAUUCGG |
| (SEQ ID NO: 166) | (SEQ ID NO: 180) |
| TGAGGGCTCCACCCTCACGA | UGAGGGCUCCACCCUCACGA |
| (SEQ ID NO: 167) | (SEQ ID NO: 181) |
| AAGGATTGAGGGCTCCACCC | AAGGAUUGAGGGCUCCACCC |
| (SEQ ID NO: 168) | (SEQ ID NO: 182) |
| GCTCCACCCTCACGAGTGGG | GCUCCACCCUCACGAGUGGG |
| (SEQ ID NO: 169) | (SEQ ID NO: 183) |
| TGAGGGCTCCACCCTCACGA | UGAGGGCUCCACCCUCACGA |
| (SEQ ID NO: 170) | (SEQ ID NO: 184) |

[0197] The engineered superexon donor encodes a shortened polyA signal to ensure proper transcriptional signals during mRNA generation from corrected genomic edits. The 3′ RACE characterization confirmed the addition of a polyA tail in superexon-corrected transcripts (FIG. 4E). Future efforts aimed to engineer superexon donors with 3′ UTRs optimized for mRNA stability may result in enhanced therapeutic potential. HITI-mediated single exon and superexon gene editing approaches can also be applied to other genetic diseases including those with gene targets, like DMD, that may be too large to fully package in AAV delivery vectors or characterized by a wide-spectrum of patient mutations, including hemophilia, cystic fibrosis, and Neurofibromatosis type 1.

[0198] Previously, proof-of-principle HITI-mediated gene corrective strategies characterized editing outcomes by Surveyor analysis, in-out PCR amplification, ddPCR, and TOPO sequencing. In this study, Tn5-transposon-based library preparation methods and unbiased deep sequencing characterization were used for greater resolution of diverse HITI-mediated editing outcomes. Using these methods, genomic site-specific integration of intended donor corrections, inverted donor insertions, indels, AAV-ITR integrations, and AAV-Cas9 coding sequences were detected. Analysis of cDNA edits demonstrated on-target intended splicing and aberrant splicing including intended donor inclusion, inverted donor sequences, Cas9 coding sequences, circular RNAs, multi-exon skips, and alternative splice sites in downstream introns. These results are all consistent with previous observations of unintended editing outcomes using AAV-CRISPR.

[0199] Gene editing technologies have garnered incredible enthusiasm for the potential to correct genetic mutations to restore healthy, wild-type gene sequences. However, the majority of gene editing strategies being advanced to clinical trials today involve gene disruption, activation of compensatory factors, introduction of therapeutic genes to non-native “safe-harbor” loci, or the creation of truncated, partially functional gene sequences. The compositions and methods detailed herein represent an important step towards realizing the full potential of genome editing to treat the fundamental cause of genetic disease.

[0200] The foregoing description of the specific aspects will so fully reveal the general nature of the invention that others can, by applying knowledge within the skill of the art, readily modify and/or adapt for various applications such specific aspects, without undue experimentation, without departing from the general concept of the present disclosure. Therefore, such adaptations and modifications are intended to be within the meaning and range of equivalents of the disclosed aspects, based on the teaching and guidance presented herein. It is to be understood that the phraseology or terminology herein is for the purpose of description and not of limitation, such that the terminology or phraseology of the present specification is to be interpreted by the skilled artisan in light of the teachings and guidance.

[0201] The breadth and scope of the present disclosure should not be limited by any of the above-described exemplary aspects, but should be defined only in accordance with the following claims and their equivalents.

[0202] All publications, patents, patent applications, and/or other documents cited in this application are incorporated by reference in their entirety for all purposes to the same extent as if each individual publication, patent, patent application, and/or other document were individually indicated to be incorporated by reference for all purposes.

[0203] For reasons of completeness, various aspects of the invention are set out in the following numbered clauses:

[0204] Clause 1. A CRISPR/Cas-based genome editing system comprising one or more vectors encoding a composition, the composition comprising: (a) a guide RNA (gRNA) targeting a fragment of a mutant dystrophin gene, wherein the gRNA hybridizes to a target sequence within intron 51 or intron 44 of the mutant dystrophin gene; (b) a Cas protein or a fusion protein comprising the Cas protein; and (c) a donor sequence comprising a fragment of a wild-type dystrophin gene, wherein the donor sequence comprises exon 52 of the wild-type dystrophin gene.

[0205] Clause 2. A CRISPR/Cas-based genome editing system comprising: (a) a guide RNA (gRNA) targeting a fragment of a mutant dystrophin gene, wherein the gRNA hybridizes to a target sequence within intron 51 or intron 44 of the mutant dystrophin gene; (b) a Cas protein or a fusion protein comprising the Cas protein; and (c) a donor sequence comprising a fragment of a wild-type dystrophin gene, wherein the donor sequence comprises exon 52 of the wild-type dystrophin gene.

[0206] Clause 3. A CRISPR/Cas-based genome editing system comprising one or more vectors encoding a composition, the composition comprising: (a) a guide RNA (gRNA) targeting a fragment of a mutant dystrophin gene; (b) a Cas protein or a fusion protein comprising the Cas protein; and (c) a donor sequence comprising a fragment of a wild-type dystrophin gene.

[0207] Clause 4. A CRISPR/Cas-based genome editing system comprising: (a) a guide RNA (gRNA) targeting a fragment of a mutant dystrophin gene; (b) a Cas protein or a fusion protein comprising the Cas protein; and (c) a donor sequence comprising a fragment of a wild-type dystrophin gene.

[0208] Clause 5. The system of clause 3 or 4, wherein the gRNA hybridizes to a target sequence within intron 51 or intron 44 of the mutant dystrophin gene.

[0209] Clause 6. The system of clause 1, 2, or 5, wherein the gRNA hybridizes to a target sequence within the polynucleotide sequence of SEQ ID NO: 128 or SEQ ID NO: 156.

[0210] Clause 7. The system of any one of clauses 3-6, wherein the donor sequence comprises exon 52 of the wild-type dystrophin gene.

[0211] Clause 8. The system of clause 1, 2, or 7, wherein donor sequence comprises the polynucleotide sequence of SEQ ID NO: 53.

[0212] Clause 9. The system of any one of clauses 1-8, wherein the fragment of the wild-type dystrophin gene is flanked on both sides by a gRNA spacer and/or a PAM sequence.

[0213] Clause 10. The system of any one of clauses 1-9, wherein the gRNA targets an intron that is between exon 51 and exon 52 of the mutant dystrophin gene.

[0214] Clause 11. The system of any one of clauses 1-10, wherein the donor sequence comprises multiple exons of the wild-type dystrophin gene or a functional equivalent thereof.

[0215] Clause 12. The system of any one of clauses 1-11, wherein the donor sequence comprises one or more exons selected from exon 52, exon 53, exon 54, exon 55, exon 56, exon 57, exon 58, exon 59, exon 60, exon 61, exon 62, exon 63, exon 64, exon 65, exon 66, exon 67, exon 68, exon 69, exon 70, exon 71, exon 72, exon 73, exon 74, exon 75, exon 76, exon 77, exon 78, and exon 79 of the wild-type dystrophin gene or a functional equivalent thereof, or wherein the donor sequence comprises exons 52-79 of the wild-type dystrophin gene or a functional equivalent thereof, or wherein the donor sequence comprises exons 45-79 of the wild-type dystrophin gene or a functional equivalent thereof.

[0216] Clause 13. The system of any one of clauses 1-12, wherein exon 52 of the mutant dystrophin gene is mutated or at least partially deleted from the dystrophin gene, or wherein exon 52 of the mutant dystrophin gene is deleted and the intron is juxtaposed to where the deleted exon 52 would be in a corresponding wild-type dystrophin gene.

[0217] Clause 14. The system of any one of clauses 1-13, wherein the gRNA binds and targets a polynucleotide sequence comprising: (a) a sequence selected from SEQ ID NOs: 29-51, 87, 157-170; (b) a fragment of a sequence selected from SEQ ID NOs: 29-51, 87, 157-170; (c) a complement of a sequence selected from SEQ ID NOs: 29-51, 87, 157-170, or a fragment thereof; (d) a nucleic acid that is substantially identical to a sequence selected from SEQ ID NOs: 29-51, 87, 157-170, or a complement thereof; or (e) a nucleic acid that hybridizes under stringent conditions to a sequence selected from SEQ ID NOs: 29-51, 87, 157-170, or a complement thereof, or a sequence substantially identical thereto.

[0218] Clause 15. The system of any one of clauses 1-14, wherein the gRNA binds and targets or is encoded by a polynucleotide sequence selected from SEQ ID NOs: 29-51, 87, 157-170, a complement thereof, or a variant thereof.

[0219] Clause 16. The system of any one of clauses 9-15, wherein the gRNA spacer comprises a sequence selected from SEQ ID NOs: 29-51, 87, 157-170, a complement thereof, or a variant thereof.

[0220] Clause 17. The system of any one of clauses 1-16, wherein the gRNA comprises a polynucleotide sequence selected from SEQ ID NOs: 64-86, 88, 171-184, a complement thereof, or a variant thereof.

[0221] Clause 18. The system of any one of clauses 1-17, wherein the gRNA binds or is encoded by a polynucleotide sequence selected from SEQ ID NOs: 35, 40, and 44, or wherein the gRNA comprises a polynucleotide sequence selected from SEQ ID NOs: 70, 75, and 79.

[0222] Clause 19. The system of any one of clauses 1-18, wherein the donor sequence comprises a polynucleotide sequence selected from SEQ ID NOs: 53-56, 154, and 155.

[0223] Clause 20. The system of clause 19, wherein the donor sequence comprises a polynucleotide of SEQ ID NO: 55.

[0224] Clause 21. The system of clause 19, wherein the donor sequence comprises a polynucleotide of SEQ ID NO: 56.

[0225] Clause 22. The system of any one of clauses 1-21, wherein the Cas protein is a Streptococcus pyogenes Cas9 protein or a Staphylococcus aureus Cas9 protein.

[0226] Clause 23. The system of any one of clauses 1-22, wherein the Cas protein comprises an amino acid sequence of SEQ ID NO: 18 or SEQ ID NO: 19.

[0227] Clause 24. The system of any one of clauses 1, 3, and 5-23, wherein the vector is a viral vector.

[0228] Clause 25. The system of clause 24, wherein the vector is an Adeno-associated virus (AAV) vector.

[0229] Clause 26. The system of clause 25, wherein the AAV vector is AAV1, AAV2, AAV3, AAV4, AAV5, AAV6, AAV7, AAV8, AAV9, AAV-10, AAV-11, AAV-12, AAV-13, or AAVrh.74 vector.

[0230] Clause 27. The system of clause 26, wherein one of the one or more vectors comprises a polynucleotide sequence selected from SEQ ID NOs: 57-60 and 129-130.

[0231] Clause 28. The system of any one of clauses 1-27, wherein the molar ratio between gRNA and donor sequence is 1:1, or 1:5, or from 5:1 to 1:10, or from 1:1 to 1:5.

[0232] Clause 29. A recombinant polynucleotide encoding a donor sequence, wherein the donor sequence is flanked on both sides by a gRNA spacer and/or a PAM sequence, and wherein the donor sequence comprises one or more exons selected from exon 52, exon 53, exon 54, exon 55, exon 56, exon 57, exon 58, exon 59, exon 60, exon 61, exon 62, exon 63, exon 64, exon 65, exon 66, exon 67, exon 68, exon 69, exon 70, exon 71, exon 72, exon 73, exon 74, exon 75, exon 76, exon 77, exon 78, and exon 79 of a dystrophin gene.

[0233] Clause 30. The system of any one of clauses 1-28 or the recombinant polynucleotide of clause 29, wherein the dystrophin gene is a human dystrophin gene.

[0234] Clause 31. The system or the recombinant polynucleotide of clause 30, wherein the system results in a dystrophin gene that encodes an in-frame transcript comprising an exon 51 joined with an exon comprising a sequence of SEQ ID NO: 53 or SEQ ID NO: 55, and with an intron therebetween.

[0235] Clause 32. The system or the recombinant polynucleotide of clause 30 or 31, wherein the donor sequence comprises a polynucleotide sequence comprising exons 52-79 of the human dystrophin gene.

[0236] Clause 33. The system or the recombinant polynucleotide of clause 32, wherein the donor sequence comprises the polynucleotide sequence of SEQ ID NO: 55 or SEQ ID NO: 56.

[0237] Clause 34. The recombinant polynucleotide of clause 29, wherein the recombinant polynucleotide comprises a sequence selected from SEQ ID NOs: 57-60.

[0238] Clause 35. A vector comprising the recombinant polynucleotide of any one of clauses 27-32.

[0239] Clause 36. A cell comprising the recombinant polynucleotide of any one of clauses 29-34 or the vector of clause 35.

[0240] Clause 37. A composition for restoring dystrophin function in a cell having a mutant dystrophin gene, the composition comprising the system of any one of clauses 1-28 or 30-33, the recombinant polynucleotide of any one of clauses 29-34, or the vector of clause 35.

[0241] Clause 38. A kit comprising the system of any one of clauses 1-28 or 30-33, the recombinant polynucleotide of any one of clauses 29-34, or the vector of clause 35, or the composition of clause 35.

[0242] Clause 39. A method for restoring dystrophin function in a cell or a subject having a mutant dystrophin gene, the method comprising contacting the cell or the subject with the system of any one of clauses 1-28 or 30-33, the recombinant polynucleotide of any one of clauses 29-34, or the vector of clause 35, or the composition of clause 37.

[0243] Clause 40. The method of clause 39, wherein the method results in a dystrophin gene that encodes an in-frame transcript comprising an exon 51 joined with an exon comprising a sequence of SEQ ID NO: 53 or SEQ ID NO: 55, and with an intron therebetween.

[0244] Clause 41. A method for restoring dystrophin function in a cell or a subject having a disrupted dystrophin gene caused by one or more deleted or mutated exons, the method comprising contacting the cell or the subject with the system of any one of clauses 1-28 or 30-33, the recombinant polynucleotide of any one of clauses 29-34, or the vector of clause 35, or the composition of clause 37.

[0245] Clause 42. The method of clause 41, wherein the method results in a dystrophin gene that encodes an in-frame transcript comprising an exon 51 joined with an exon comprising a sequence of SEQ ID NO: 53 or SEQ ID NO: 55, and with an intron therebetween.

[0246] Clause 43. The method of clause 41 or 42, wherein dystrophin function is restored by inserting one or more wild-type exons of dystrophin gene corresponding to the one or more deleted or mutated exons.

[0247] Clause 44. The method of any one of clauses 39-43, wherein the subject is suffering from Duchenne Muscular Dystrophy.

[0248] Clause 45. A genome editing system for correcting a dystrophin gene, the system comprising a donor sequence comprising exons 52-79 or exons 45-79 of the wild-type dystrophin gene.

[0249] Clause 46. The genome editing system of clause 45, further comprising a nuclease selected from homing endonuclease, zinc finger nuclease, TALEN, and Cas protein.

SEQUENCES

SEQ ID NO: 1
NRG (N can be any nucleotide residue, e.g., any of A, G, C, or T)
SEQ ID NO: 2
NGG (N can be any nucleotide residue, e.g., any of A, G, C, or T)
SEQ ID NO: 3
NAG (N can be any nucleotide residue, e.g., any of A, G, C, or T)
SEQ ID NO: 4
NGGNG (N can be any nucleotide residue, e.g., any of A, G, C, or T)
SEQ ID NO: 5
NNAGAAW (W = A or T; N can be any nucleotide residue, e.g., any of A, G, C, or T)
SEQ ID NO: 6
NAAR (R = A or G; N can be any nucleotide residue, e.g., any of A, G, C, or T)
SEQ ID NO: 7
NNGRR (R = A or G; N can be any nucleotide residue, e.g., any of A, G, C, or T)
SEQ ID NO: 8
NNGRRN (R = A or G; N can be any nucleotide residue, e.g., any of A, G, C, or T)
SEQ ID NO: 9
NNGRRT (R = A or G; N can be any nucleotide residue, e.g., any of A, G, C, or T)
SEQ ID NO: 10
NNGRRV (R = A or G; N can be any nucleotide residue, e.g., any of A, G, C, or T)
SEQ ID NO: 11
NNNNGATT (N can be any nucleotide residue, e.g., any of A, G, C, or T)
SEQ ID NO: 12
NNNNGNNN (N can be any nucleotide residue, e.g., any of A, G, C, or T)
SEQ ID NO: 13
NGA (N can be any nucleotide residue, e.g., any of A, G, C, or T)
SEQ ID NO: 14
NNNRRT (R = A or G; N can be any nucleotide residue, e.g., any of A, G, C, or T)
SEQ ID NO: 15
ATTCCT
SEQ ID NO: 16
NGAN (N can be any nucleotide residue, e.g., any of A, G, C, or T)
SEQ ID NO: 17
NGNG (N can be any nucleotide residue, e.g., any of A, G, C, or T)
SEQ ID NO: 18
Streptccoccus pyogenes Cas9
MDKKYSTGLDTGTNSVGWAVITDEYKVPSKKFKVLGNTDRHSIKKNLTGALLFDSGETAEATRLKRTA
RRRYTRRKNRTCYLQEIFSNEMAKVDDSFFHRLEESFLVEEDKKHERHPIFGNIVDEVAYHEKYPTTY
HLRKKLVDSTDKADLRLIYLALAHMIKFRGHFLIEGDLNPDNSDVDKLFIQLVQTYNQLFEENPINAS
GVDAKAILSARLSKSRRLENLTAQLPGEKKNGLFGNLTALSLGLTPNFKSNFDLAEDAKLQLSKDTYD
DDLDNLLAQTGDQYADLFLAAKNLSDAILLSDILRVNTEITKAPLSASMIKRYDEHHQDLTLLKALVR
QQLPEKYKEIFFDQSKNGYAGYIDGGASQEEFYKFIKPILEKMDGTEELLVKLNREDLLRKQRTFDNG
SIPHQIHLGELHAILRRQEDEYPFLKDNREKIEKILTFRIPYYVGPLARGNSREAWMTRKSEETTTPW
NFEEVVDKGASAQSFIERMTNFDKNLPNEKVLPKHSLLYEYFTVYNELTKVKYVTEGMRKPAFLSGEQ
KKAIVDLLFKTNRKVTVKQLKEDYFKKIECFDSVEISGVEDRENASLGTYHDLLKIIKDKDFLDNEEN
EDILEDIVLTLTLFEDREMIEERLKTYAHLFDDKVMKQLKRRRYTGWGRLSRKLINGIRDKQSGKTTL
DELKSDGFANRNEMQLIHDDSLTFKEDIQKAQVSGQGDSLHEHTANLAGSPAIKKGILQTVKVVDELV
KVMGRHKPENIVIEMARENQTTQKGQKNSRERMKRIEEGIKELGSQILKEHPVENTQLQNEKLYLYYL
QNGRDMYVDQELDINRLSDYDVDHIVPQSFLKDDSIDNKVLTRSDKNRGKSDNVPSEEVVKKMKNYWR
QLLNAKLITQRKEDNLTKAERGGLSELDKAGFIKRQLVETRQITKHVAQILDSRMNTKYDENDKLIRE
VKVITLKSKLVSDFRKDFQFYKVREINNYHHAHDAYLNAVVGTALIKKYPKLESEFVYGDYKVYDVRK
MTAKSEQETGKATAKYFFYSNIMNFFKTEITLANGEIRKRPLIETNGETGEIVWDKGRDFATVRKVLS
MPQVNIVKKTEVQTGGFSKESILPKRNSDKLTARKKDWDPKKYGGFDSPTVAYSVLVVAKVEKGKSKK
LKSVKELLGITTMERSSFEKNPIDELEAKGYKEVKKDLIIKLPKYSLFELENGRKRMLASAGELQKGN
AYNKHRDKPIREQAENIIHLFTLTNLGAPAAFKYFDTTTDRKRYTSTKEVLDATLIHQSITGLYETRI
DLSQLGGD
SEQ ID NO: 19
Staphylococcus aureus Cas9 molecule
MKRNYILGLDTGITSVGYGIIDYETRDVIDAGVRLFKEANVENNEGRRSKRGARRLKRRRRHRIQRVK
KLLFDYNLLTDHSELSGINPYEARVKGLSQKLSEEEFSAALLHLAKRRGVHNVNEVEEDTGNELSTKE
QISRNSKALEEKYVAELQLERLKKDGEVRGSINREKTSDYVKEAKQLLKVQKAYHQLDQSFIDTYIDL
LETRRTYYEGPGEGSPFGWKDIKEWYEMLMGHCTYFPEELRSVKYAYNADLYNALNDLNNLVITRDEN
EKLEYYEKEQIIENVEKQKKKPTLKQTAKEILVNEEDIKGYRVTSTGKPEFTNLKVYHDIKDITARKE
IIENAELLDQTAKILTTYQSSEDIQEELTNLNSELTQEEIEQISNLKGYTGTHNLSLKAINLILDELW
HTNDNQTAIFNRLKLVPKKVDLSQQKEIPTTLVDDFILSPVVKRSFIQSIKVINAIIKKYGLPNDIII
ELAREKNSKDAQKMINEMQKRNRQTNERIEEIIRTTGKENAKYLIEKIKLHDMQEGKCLYSLEAIPLE
DLLNNPFNYEVDHIIPRSVSFDNSFNNKVLVKQEENSKKGNRTPFQYLSSSDSKISYETFKKHILNLA
KGKGRISKTKKEYLLEERDINRFSVQKDFINRNLVDTRYATRGLMNLLRSYFRVNNLDVKVKSINGGF
TSFLRRKWKFKKERNKGYKHHAEDALITANADFIFKEWKKLDKAKKVMENQMFEEKQAESMPEIETEQ
EYKEIFITPHQIKHIKDFKDYKYSHRVDKKPNRELINDTLYSTRKDDKGNTLIVNNLNGLYDKDNDKL
KKLINKSPEKLLMYHHDPQTYQKLKLIMEQYGDEKNPLYKYYEETGNYLTKYSKKDNGPVIKKIKYYG
NKLNAHLDITDDYPNSRNKVVKLSLKPYRFDVYLDNGVYKFVTVKNLDVIKKENYYEVNSKCYEEAKK
LKKISNQAEFTASFYNNDLIKINGELYRVTGVNNDLLNRIEVNMIDITYREYLENMNDKRPPRIIKTT
ASKTQSIKKYSTDILGNLYEVKSKKHPQIIKKG
SEQ ID NO: 20
codon optimized polynucleotide encoding S. pyogenes Cas9
atggataaaa agtacagcat cgggctggac atcggtacaa actcagtggg gtgggccgtg
attacggacg agtacaaggt accctccaaa aaatttaaag tgctgggtaa cacggacaga
cactctataa agaaaaatct tattggagcc ttgctgttcg actcaggcga gacagccgaa
gccacaaggt tgaagcggac cgccaggagg cggtatacca ggagaaagaa ccgcatatgc
tacctgcaag aaatcttcag taacgagatg gcaaaggttg acgatagctt tttccatcgc
ctggaagaat cctttcttgt tgaggaagac aagaagcacg aacggcaccc catctttggc
aatattgtcg acgaagtggc atatcacgaa aagtacccga ctatctacca cctcaggaag
aagctggtgg actctaccga taaggcggac ctcagactta tttatttggc actcgcccac
atgattaaat ttagaggaca tttcttgatc gagggcgacc tgaacccgga caacagtgac
gtcgataagc tgttcatcca acttgtgcag acctacaatc aactgttcga agaaaaccct
ataaatgctt caggagtcga cgctaaagca atcctgtccg cgcgcctctc aaaatctaga
agacttgaga atctgattgc tcagttgccc ggggaaaaga aaaatggatt gtttggcaac
ctgatcgccc tcagtctcgg actgacccca aatttcaaaa gtaacttcga cctggccgaa
gacgctaagc tccagctgtc caaggacaca tacgatgacg acctcgacaa tctgctggcc
cagattgggg atcagtacgc cgatctcttt ttggcagcaa agaacctgtc cgacgccatc
ctgttgagcg atatcttgag agtgaacacc gaaattacta aagcacccct tagcgcatct
atgatcaagc ggtacgacga gcatcatcag gatctgaccc tgctgaaggc tcttgtgagg
caacagctcc ccgaaaaata caaggaaatc ttctttgacc agagcaaaaa cggctacgct
ggctatatag atggtggggc cagtcaggag gaattctata aattcatcaa gcccattctc
gagaaaatgg acggcacaga ggagttgctg gtcaaactta acagggagga cctgctgcgg
aagcagcgga cctttgacaa cgggtctatc ccccaccaga ttcatctggg cgaactgcac
gcaatcctga ggaggcagga ggatttttat ccttttctta aagataaccg cgagaaaata
gaaaagattc ttacattcag gatcccgtac tacgtgggac ctctcgcccg gggcaattca
cggtttgcct ggatgacaag gaagtcagag gagactatta caccttggaa cttcgaagaa
gtggtggaca agggtgcatc tgcccagtct ttcatcgagc ggatgacaaa ttttgacaag
aacctcccta atgagaaggt gctgcccaaa cattctctgc tctacgagta ctttaccgtc
tacaatgaac tgactaaagt caagtacgtc accgagggaa tgaggaagcc ggcattcctt
agtggagaac agaagaaggc gattgtagac ctgttgttca agaccaacag gaaggtgact
gtgaagcaac ttaaagaaga ctactttaag aagatcgaat gttttgacag tgtggaaatt
tcaggggttg aagaccgctt caatgcgtca ttggggactt accatgatct tctcaagatc
ataaaggaca aagacttcct ggacaacgaa gaaaatgagg atattctcga agacatcgtc
ctcaccctga ccctgttcga agacagggaa atgatagaag agcgcttgaa aacctatgcc
cacctcttcg acgataaagt tatgaagcag ctgaagcgca ggagatacac aggatgggga
agattgtcaa ggaagctgat caatggaatt agggataaac agagtggcaa gaccatactg
gatttcctca aatctgatgg cttcgccaat aggaacttca tgcaactgat tcacgatgac
tctcttacct tcaaggagga cattcaaaag gctcaggtga gcgggcaggg agactccctt
catgaacaca tcgcgaattt ggcaggttcc cccgctatta aaaagggcat ccttcaaact
gtcaaggtgg tggatgaatt ggtcaaggta atgggcagac ataagccaga aaatattgtg
atcgagatgg cccgcgaaaa ccagaccaca cagaagggcc agaaaaatag tagagagcgg
atgaagagga tcgaggaggg catcaaagag ctgggatctc agattctcaa agaacacccc
gtagaaaaca cacagctgca gaacgaaaaa ttgtacttgt actatctgca gaacggcaga
gacatgtacg tcgaccaaga acttgatatt aatagactgt ccgactatga cgtagaccat
atcgtgcccc agtccttcct gaaggacgac tccattgata acaaagtctt gacaagaagc
gacaagaaca ggggtaaaag tgataatgtg cctagcgagg aggtggtgaa aaaaatgaag
aactactggc gacagctgct taatgcaaag ctcattacac aacggaagtt cgataatctg
acgaaagcag agagaggtgg cttgtctgag ttggacaagg cagggtttat taagcggcag
ctggtggaaa ctaggcagat cacaaagcac gtggcgcaga ttttggacag ccggatgaac
acaaaatacg acgaaaatga taaactgata cgagaggtca aagttatcac gctgaaaagc
aagctggtgt ccgattttcg gaaagacttc cagttctaca aagttcgcga gattaataac
taccatcatg ctcacgatgc gtacctgaac gctgttgtcg ggaccgcctt gataaagaag
tacccaaagc tggaatccga gttcgtatac ggggattaca aagtgtacga tgtgaggaaa
atgatagcca agtccgagca ggagattgga aaggccacag ctaagtactt cttttattct
aacatcatga atttttttaa gacggaaatt accctggcca acggagagat cagaaagcgg
ccccttatag agacaaatgg tgaaacaggt gaaatcgtct gggataaggg cagggatttc
gctactgtga ggaaggtgct gagtatgcca caggtaaata tcgtgaaaaa aaccgaagta
cagaccggag gattttccaa ggaaagcatt ttgcctaaaa gaaactcaga caagctcatc
gcccgcaaga aagattggga ccctaagaaa tacgggggat ttgactcacc caccgtagcc
tattctgtgc tggtggtagc taaggtggaa aaaggaaagt ctaagaagct gaagtccgtg
aaggaactct tgggaatcac tatcatggaa agatcatcct ttgaaaagaa ccctatcgat
ttcctggagg ctaagggtta caaggaggtc aagaaagacc tcatcattaa actgccaaaa
tactctctct tcgagctgga aaatggcagg aagagaatgt tggccagcgc cggagagctg
caaaagggaa acgagcttgc tctgccctcc aaatatgtta attttctcta tctcgcttcc
cactatgaaa agctgaaagg gtctcccgaa gataacgagc agaagcagct gttcgtcgaa
cagcacaagc actatctgga tgaaataatc gaacaaataa gcgagttcag caaaagggtt
atcctggcgg atgctaattt ggacaaagta ctgtctgctt ataacaagca ccgggataag
cctattaggg aacaagccga gaatataatt cacctcttta cactcacgaa tctcggagcc
cccgccgcct tcaaatactt tgatacgact atcgaccgga aacggtatac cagtaccaaa
gaggtcctcg atgccaccct catccaccag tcaattactg gcctgtacga aacacggatc
gacctctctc aactgggcgg cgactag
SEQ ID NO: 21
codon optimized nucleic acid sequences encoding S. aureus Cas9
atgaaaagga actacattct ggggctggac atcgggatta caagcgtggg gtatgggatt
attgactatg aaacaaggga cgtgatcgac gcaggcgtca gactgttcaa ggaggccaac
gtggaaaaca atgagggacg gagaagcaag aggggagcca ggcgcctgaa acgacggaga
aggcacagaa tccagagggt gaagaaactg ctgttcgatt acaacctgct gaccgaccat
tctgagctga gtggaattaa tccttatgaa gccagggtga aaggcctgag tcagaagctg
tcagaggaag agttttccgc agctctgctg cacctggcta agcgccgagg agtgcataac
gtcaatgagg tggaagagga caccggcaac gagctgtcta caaaggaaca gatctcacgc
aatagcaaag ctctggaaga gaagtatgtc gcagagctgc agctggaacg gctgaagaaa
gatggcgagg tgagagggtc aattaatagg ttcaagacaa gcgactacgt caaagaagcc
aagcagctgc tgaaagtgca gaaggcttac caccagctgg atcagagctt catcgatact
tatatcgacc tgctggagac tcggagaacc tactatgagg gaccaggaga agggagcccc
ttcggatgga aagacatcaa ggaatggtac gagatgctga tgggacattg cacctatttt
ccagaagagc tgagaagcgt caagtacgct tataacgcag atctgtacaa cgccctgaat
gacctgaaca acctggtcat caccagggat gaaaacgaga aactggaata ctatgagaag
ttccagatca tcgaaaacgt gtttaagcag aagaaaaagc ctacactgaa acagattgct
aaggagatcc tggtcaacga agaggacatc aagggctacc gggtgacaag cactggaaaa
ccagagttca ccaatctgaa agtgtatcac gatattaagg acatcacagc acggaaagaa
atcattgaga acgccgaact gctggatcag attgctaaga tcctgactat ctaccagagc
tccgaggaca tccaggaaga gctgactaac ctgaacagcg agctgaccca ggaagagatc
gaacagatta gtaatctgaa ggggtacacc ggaacacaca acctgtccct gaaagctatc
aatctgattc tcgatgagct gtggcataca aacgacaatc agattgcaat ctttaaccgg
ctgaagctgg tcccaaaaaa ggtggacctg agtcagcaga aagagatccc aaccacactg
gtggacgatt tcattctgtc acccgtggtc aagcggagct tcatccagag catcaaagtg
atcaacgcca tcatcaagaa gtacggcctg cccaatgata tcattatcga gctggctagg
gagaagaaca gcaaggacgc acagaagatg atcaatgaga tgcagaaacg aaaccggcag
accaatgaac gcattgaaga gattatccga actaccggga aagagaacgc aaagtacctg
attgaaaaaa tcaagctgca cgatatgcag gagggaaagt gtctgtattc tctggaggcc
tccccctgg aggacctgct gaacaatcca ttcaactacg aggtcgatca tattatcccc
agaagcgtgt ccttcgacaa ttcctttaac aacaaggtgc tggtcaagca ggaagagaac
tctaaaaagg gcaataggac tcctttccag tacctgtcta gttcagattc caagatctct
tacgaaacct ttaaaaagca cattctgaat ctggccaaag gaaagggccg catcagcaag
accaaaaagg agtacctgct ggaagagcgg gacatcaaca gattctccgt ccagaaggat
tttattaacc ggatcctatt ggacacaaga tacgctactc gcggcctgat gaatctgctg
cgatcctatt tccgggtgaa caatctggat gtgaaagtca agtccatcaa cggcgggttc
acatcttttc tgaggcgcaa atggaagttt aaaaaggagc gcaacaaagg gtacaagcac
catgccgaag atgctctgat tatcgcaaat gccgacttca tctttaagga gtggaaaaag
ctggacaaag ccaagaaagt gatggagaac cagatgttcg aagagaagca ggccgaatct
atgcccgaaa tcgagacaga acaggagtac aaggagattt tcatcactcc tcaccagatc
aagcatatca aggatttcaa ggactacaag tactctcacc gggtggataa aaagcccaac
agagagctga tcaatgacac cctgtatagt acaagaaaag acgataaggg gaataccctg
attgtgaaca atctgaacgg actgtacgac aaagataatg acaagctgaa aaagctgatc
aacaaaagtc ccgagaagct gctgatgtac caccatgatc ctcagacata tcagaaactg
aagctgatta tggagcagta cggcgacgag aagaacccac tgtataagta ctatgaagag
actgggaact acctgaccaa gtatagcaaa aaggataatg gccccgtgat caagaagatc
aagtactatg ggaacaagct gaatgcccat ctggacatca cagacgatta coctaacagt
cgcaacaagg tggtcaagct gtcactgaag ccatacagat tcgatgtcta tctggacaac
ggcgtgtata aatttgtgac tgtcaagaat ctggatgtca tcaaaaagga gaactactat
gaagtgaata gcaagtgcta cgaagaggct aaaaagctga aaaagattag caaccaggca
gagttcatcg cctcctttta caacaacgac ctgattaaga tcaatggcga actgtatagg
gtcatcgggg tgaacaatga tctgctgaac cccattgaag tgaatatgat tgacatcact
taccgagagt atctggaaaa catgaatgat aagcgccccc ctcgaattat caaaacaatt
gcctctaaga ctcagagtat caaaaagtac tcaaccgaca ttctgggaaa cctgtatgag
gtgaagagca aaaagcaccc tcagattatc aaaaagggc
SEQ ID NO: 22
codon optimized nucleic acid sequences encoding S. aureus Cas9
atgaagcgga actacatcct gggcctggac atcggcatca ccagcgtggg ctacggcatc
atcgactacg agacacggga cgtgatcgat gccggcgtgc ggctgttcaa agaggccaac
gtggaaaaca acgagggcag gcggagcaag agaggcgcca gaaggctgaa gcggcggagg
cggcatagaa tccagagagt gaagaagctg ctgttcgact acaacctgct gaccgaccac
agcgagctga gcggcatcaa cccctacgag gccagagtga agggcctgag ccagaagctg
agcgaggaag agttctctgc cgccctgctg cacctggcca agagaagagg cgtgcacaac
gtgaacgagg tggaagagga caccggcaac gagctgtcca ccaaagagca gatcagccgg
aacagcaagg ccctggaaga gaaatacgtg gccgaactgc agctggaacg gctgaagaaa
gacggcgaag tgcggggcag catcaacaga ttcaagacca gcgactacgt gaaagaagcc
aaacagctgc tgaaggtgca gaaggcctac caccagctgg accagagctt catcgacacc
tacatcgacc tgctggaaac ccggcggacc tactatgagg gacctggcga gggcagcccc
ttcggctgga aggacatcaa agaatggtac gagatgctga tgggccactg cacctacttc
cccgaggaac tgcggagcgt gaagtacgcc tacaacgccg acctgtacaa cgccctgaac
gacctgaaca atctcgtgat caccagggac gagaacgaga agctggaata ttacgagaag
ttccagatca tcgagaacgt gttcaagcag aagaagaagc ccaccctgaa gcagatcgcc
aaagaaatcc tcgtgaacga agaggatatt aagggctaca gagtgaccag caccggcaag
cccgagttca ccaacctgaa ggtgtaccac gacatcaagg acattaccgc ccggaaagag
attattgaga acgccgagct getggatcag attgccaaga tcctgaccat ctaccagagc
agcgaggaca tccaggaaga actgaccaat ctgaactccg agctgaccca ggaagagatc
gagcagatct ctaatctgaa gggctatacc ggcacccaca acctgagcct gaaggccatc
aacctgatcc tggacgagct gtggcacacc aacgacaacc agatcgctat cttcaaccgg
ctgaagctgg tgcccaagaa ggtggacctg tcccagcaga aagagatccc caccaccctg
gtggacgact tcatcctgag ccccgtcgtg aagagaagct tcatccagag catcaaagtg
atcaacgcca tcatcaagaa gtacggcctg cccaacgaca tcattatcga gctggcccgc
gagaagaact ccaaggacgc ccagaaaatg atcaacgaga tgcagaagcg gaaccggcag
accaacgagc ggatcgagga aatcatccgg accaccggca aagagaacgc caagtacctg
atcgagaaga tcaagctgca cgacatgcag gaaggcaagt gcctgtacag cctggaagcc
atccctctgg aagatctgct gaacaacccc ttcaactatg aggtggacca catcatcccc
agaagcgtgt ccttcgacaa cagcttcaac aacaaggtgc tcgtgaagca ggaagaaaac
agcaagaagg gcaaccggac cccattccag tacctgagca gcagcgacag caagatcagc
tacgaaacct tcaagaagca catcctgaat ctggccaagg gcaagggcag aatcagcaag
accaagaaag agtatctgct ggaagaacgg gacatcaaca ggttctccgt gcagaaagac
ttcatcaacc ggaacctggt ggataccaga tacgccacca gaggcctgat gaacctgctg
cggagctact tcagagtgaa caacctggac gtgaaagtga agtccatcaa tggcggcttc
accagctttc tgcggcggaa gtggaagttt aagaaagagc ggaacaaggg gtacaagcac
cacgccgagg acgccctgat cattgccaac gccgatttca tcttcaaaga gtggaagaaa
ctggacaagg ccaaaaaagt gatggaaaac cagatgttcg aggaaaagca ggccgagagc
atgcccgaga tcgaaaccga gcaggagtac aaagagatct tcatcacccc ccaccagatc
aagcacatta aggacttcaa ggactacaag tacagccacc gggtggacaa gaagcctaat
agagagecga ttaacgacac cctgtactcc acccggaagg acgacaaggg caacaccctg
atcgtgaaca atctgaacgg cctgtacgac aaggacaatg acaagctgaa aaagctgatc
aacaagagcc ccgaaaagct gctgatgtac caccacgacc cccagaccta ccagaaactg
aagctgatta tggaacagta cggcgacgag aagaatcccc tgtacaagta ctacgaggaa
accgggaact acctgaccaa gtactccaaa aaggacaacg gccccgtgat caagaagatt
aagtattacg gcaacaaact gaacgcccat ctggacatca ccgacgacta ccccaacagc
agaaacaagg tcgtgaagct gtccctgaag ccctacagat tcgacgtgta cctggacaat
ggcgtgtaca agttcgtgac cgtgaagaat ctggatgtga tcaaaaaaga aaactactac
gaagtgaata gcaagtgcta tgaggaagct aagaagctga agaagatcag caaccaggcc
gagtttatcg cctccttcta caacaacgat ctgatcaaga tcaacggcga gctgtataga
gtgatcggcg tgaacaacga cctgctgaac cggatcgaag tgaacatgat cgacatcacc
taccgcgagt acctggaaaa catgaacgac aagaggcccc ccaggatcat taagacaatc
gectccaaga cccagagcat taagaagtac agcacagaca ttctgggcaa cctgtatgaa
gtgaaatcta agaagcaccc tcagatcatc aaaaagggc
SEQ ID NO: 23
codon optimized nucleic acid sequence encoding S. aureus Cas9
atgaagcgca actacatcct cggactggac atcggcatta cctccgtggg atacggcatc
atcgattacg aaactaggga tgtgatcgac gctggagtca ggctgttcaa agaggcgaac
gtggagaaca acgaggggcg gcgctcaaag aggggggccc gccggctgaa gcgccgccgc
agacatagaa tccagcgcgt gaagaagctg ctgttcgact acaaccttct gaccgaccac
tccgaacttt ccggcatcaa cccatatgag gctagagtga agggattgtc ccaaaagctg
tccgaggaag agttctccgc cgcgttgctc cacctcgcca agcgcagggg agtgcacaat
gtgaacgaag tggaagaaga taccggaaac gagctgtcca ccaaggagca gatcagccgg
aactccaagg ccctggaaga gaaatacgtg gcggaactgc aactggagcg gctgaagaaa
gacggagaag tgcgcggctc gatcaaccgc ttcaagacct cggactacgt gaaggaggcc
aagcagctcc tgaaagtgca aaaggcctat caccaacttg accagtcctt tatcgatacc
tacatcgatc tgctcgagac tcggcggact tactacgagg gtccagggga gggctcccca
tttggttgga aggatattaa ggagtggtac gaaatgctga tgggacactg cacatacttc
cctgaggagc tgcggagcgt gaaatacgca tacaacgcag acctgtacaa cgcgctgaac
gacctgaaca atctcgtgat cacccgggac gagaacgaaa agctcgagta ttacgaaaag
ttccagatta ttgagaacgt gttcaaacag aagaagaagc cgacactgaa gcagattgcc
aaggaaatcc tcgtgaacga agaggacatc aagggctatc gagtgacctc aacgggaaag
ccggagttca ccaatctgaa ggtctaccac gacatcaaag acattaccgc ccggaaggag
atcattgaga acgcggagct gttggaccag attgcgaaga ttctgaccat ctaccaatcc
tccgaggata ttcaggaaga actcaccaac ctcaacagcg aactgaccca ggaggagata
gagcaaatct ccaacctgaa gggctacacc ggaactcata acctgagcct gaaggccatc
aacttgatcc tggacgagct gtggcacacc aacgataacc agatcgctat tttcaatcgg
ctgaagctgg tccccaagaa agtggacctc tcacaacaaa aggagatccc tactaccctt
gtggacgatt tcattctgtc ccccgtggtc aagagaagct tcatacagtc aatcaaagtg
atcaatgcca ttatcaagaa atacggtctg cocaacgaca ttatcattga gctcgcccgc
gagaagaact cgaaggacgc ccagaagatg attaacgaaa tgcagaagag gaaccgacag
actaacgaac ggatcgaaga aatcatccgg accaccggga aggaaaacgc gaagtacctg
atcgaaaaga tcaagctcca tgacatgcag gaaggaaagt gtctgtactc gctggaggcc
attccgctgg aggacttgct gaacaaccct tttaactacg aagtggatca tatcattccg
aggagcgtgt cattcgacaa ttccttcaac aacaaggtcc tcgtgaagca ggaggaaaac
tcgaagaagg gaaaccgcac gccgttccag tacctgagca gcagcgactc caagatttcc
tacgaaacct tcaagaagca catcctcaac ctggcaaagg ggaagggtcg catctccaag
accaagaagg aatatctgct ggaagaaaga gacatcaaca gattctccgt gcaaaaggac
ttcatcaace gcaacctcgt ggatactaga tacgctacte ggggtctgat gaacctcctg
agaagctact ttagagtgaa caatctggac gtgaaggtca agtcgattaa cggaggtttc
acctccttcc tgcggcgcaa gtggaagttc aagaaggaac ggaacaaggg ctacaagcac
cacgccgagg acgccctgat cattgccaac gccgacttca tcttcaaaga atggaagaaa
cttgacaagg ctaagaaggt catggaaaac cagatgttcg aagaaaagca ggccgagtct
atgcctgaaa tcgagactga acaggagtac aaggaaatct ttattacgcc acaccagatc
aaacacatca aggatttcaa ggattacaag tactcacatc gcgtggacaa aaagccgaac
agggaactga tcaacgacac cctctactcc acccggaagg atgacaaagg gaataccctc
atcgtcaaca accttaacgg cctgtacgac aaggacaacg ataagctgaa gaagctcatt
aacaagtcgc ccgaaaagtt gctgatgtac caccacgacc ctcagactta ccagaagctc
aagctgatca tggagcagta tggggacgag aaaaacccgt tgtacaagta ctacgaagaa
actgggaatt atctgactaa gtactccaag aaagataacg gccccgtgat taagaagatt
aagtactacg gcaacaagct gaacgcccat ctggacatca ccgatgacta ccctaattcc
cgcaacaagg tcgtcaagct gagcctcaag ccctaccggt ttgatgtgta ccttgacaat
ggagtgtaca agttcgtgac tctgaagaac cttgacgtga tcaagaagga gaactactac
gaagtcaact ccaagtgcta cgaggaagca aagaagttga agaagatctc gaaccaggcc
gagttcattg cctccttcta taacaacgac ctgattaaga tcaacggcga actgtaccgc
gtcattggcg tgaacaacga tctcctgaac cgcatcgaag tgaacatgat cgacatcact
taccgggaat acctggagaa tatgaacgac aagcgcccgc cccggatcat taagactatc
gcctcaaaga cccagtcgat caagaagtac agcaccgaca tcctgggcaa cctgtacgag
gtcaaatcga agaagcaccc ccagatcatc aagaaggga
SEQ ID NO: 24
codon optimized nucleic acid sequence encoding S. aureus Cas9
atggccccaaagaagaagcggaaggtcggtatccacggagtcccagcagccaagcggaactacatcct
gggcctggacatcggcatcaccagcgtgggctacggcatcatcgactacgagacacgggacgtgatcg
atgccggcgtgcggctgttcaaagaggccaacgtggaaaacaacgagggcaggcggagcaagagaggc
gccagaaggctgaagcggcggaggcggcatagaatccagagagtgaagaagctgctgttcgactacaa
cctgctgaccgaccacagcgagctgagcggcatcaacccctacgaggccagagtgaagggcctgagcc
agaagctgagcgaggaagagttctctgccgccctgctgcacctggccaagagaagaggcgtgcacaac
gtgaacgaggtggaagaggacaccggcaacgagctgtccaccagagagcagatcagccggaacagcaa
ggccctggaagagaaatacgtggccgaactgcagctggaacggctgaagaaagacggcgaagtgcggg
gcagcatcaacagattcaagaccagcgactacgtgaaagaagccaaacagctgctgaaggtgcagaag
ctatgagggacctggcgagggcagccccttcggctggaaggacatcaaagaatggtacgagatgctga
tgggccactgcacctacttccccgaggaactgcggagcgtgaagtacgcctacaacgccgacctgtac
aacgccctgaacgacctgaacaatctcgtgatcaccagggacgagaacgagaagctggaatattacga
gaagttccagatcatcgagaacgtgttcaagcagaagaagaagcccaccctgaagcagatcgccaaag
aaatcctcgtgaacgaagaggatattaagggctacagagtgaccagcaccggcaagcccgagttcacc
aacctgaaggtgtaccacgacatcaaggacattaccgcccggaaagagattattgagaacgccgagct
gctggatcagattgccaagatcctgaccatctaccagagcagcgaggacatccaggaagaactgacca
atctgaactccgagctgacccaggaagagatcgagcagatctctaatctgaagggctataccggcacc
cacaacctgagcctgaaggccatcaacctgatcctggacgagctgtggcacaccaacgacaaccagat
cgctatcttcaaccggctgaagctggtgcccaagaaggtggacctgtcccagcagaaagagatcccca
ccaccctggtggacgacttcatcctgagccccgtcgtgaagagaagcttcatccagagcatcaaagtg
atcaacgccatcatcaagaagtacggcctgcccaacgacatcattatcgagctggcccgcgagaagaa
ctccaaggacgcccagaaaatgatcaacgagatgcagaagcggaaccggcagaccaacgagcggatcg
aggaaatcatccggaccaccggcaaagagaacgccaagtacctgatcgagaagatcaagctgcacgac
atgcaggaaggcaagtgcctgtacagcctggaagccatccctctggaagatctgctgaacaacccctt
caactatgaggtggaccacatcatccccagaagcgtgtccttcgacaacagcttcaacaacaaggtgc
tcgtgaagcaggaagaaaacagcaagaagggcaaccggaccccattccagtacctgagcagcagcgac
agcaagatcagctacgaaaccttcaagaagcacatcctgaatctggccaagggcaagggcagaatcag
caagaccaagaaagagtatctgctggaagaacgggacatcaacaggttctccgtgcagaaagacttca
tcaaccggaacctggtggataccagatacgccaccagaggcctgatgaacctgctgcggagctacttc
agagtgaacaacctggacgtgaaagtgaagtccatcaatggcggcttcaccagctttctgcggcggaa
gtggaagtttaagaaagagcggaacaaggggtacaagcaccacgccgaggacgccctgatcattgcca
acgccgatttcatcttcaaagagtggaagaaactggacaaggccaaaaaagtgatggaaaaccagatg
ttcgaggaaaggcaggccgagagcatgcccgagatcgaaaccgagcaggagtacaaagagatcttcat
caccccccaccagatcaagcacattaaggacttcaaggactacaagtacagccaccgggtggacaaga
agcctaatagagagctgattaacgacaccctgtactccacccggaaggacgacaagggcaacaccctg
atcgtgaacaatctgaacggcctgtacgacaaggacaatgacaagctgaaaaagctgatcaacaagag
ccccgaaaagctgctgatgtaccaccacgacccccagacctaccagaaactgaagctgattatggaac
agtacggcgacgagaagaatcccctgtacaagtactacgaggaaaccgggaactacctgaccaagtac
tccaaaaaggacaacggccccgtgatcaagaagattaagtattacggcaacaaactgaacgcccatct
ggacatcaccgacgactaccccaacagcagaaacaaggtcgtgaagctgtccctgaagccctacagat
tcgacgtgtacctggacaatggcgtgtacaagttcgtgaccgtgaagaatctggatgtgatcaaaaaa
gaaaactactacgaagtgaatagcaagtgctatgaggaagctaagaagctgaagaagatcagcaacca
ggccgagtttatcgcctccttctacaacaacgatctgatcaagatcaacggcgagctgtatagagtga
tcggcgtgaacaacgacctgctgaaccggatcgaagtgaacatgatcgacatcacctaccgcgagtac
ctggaaaacatgaacgacaagaggccccccaggatcattaagacaatcgcctccaagacccagagcat
taagaagtacagcacagacattctgggcaacctgtatgaagtgaaatctaagaagcaccctcagatca
tcaaaaagggcaaaaggccggcggccacgaaaaaggccggccaggcaaaaaagaaaaag
SEQ ID NO: 25
codon optimized nucleic acid sequence encoding S. aureus Cas9
accggtgcca ccatgtaccc atacgatgtt ccagattacg cttcgccgaa gaaaaagcgc
aaggtcgaag cgtccatgaa aaggaactac attctggggc tggacatcgg gattacaagc
gtggggtatg ggattattga ctatgaaaca agggacgtga tcgacgcagg cgtcagactg
ttcaaggagg ccaacgtgga aaacaatgag ggacggagaa gcaagagggg agccaggcgc
ctgaaacgac ggagaaggca cagaatccag agggtgaaga aactgctgtt cgattacaac
ctgctgaccg accattctga gctgagtgga attaatcctt atgaagccag ggtgaaaggc
ctgagtcaga agctgtcaga ggaagagttt tccgcagctc tgctgcacct ggctaagcgc
cgaggagtgc ataacgtcaa tgaggtggaa gaggacaccg gcaacgagct gtctacaaag
gaacagatct cacgcaatag caaagctctg gaagagaagt atgtcgcaga gctgcagctg
gaacggctga agaaagatgg cgaggtgaga gggtcaatta ataggttcaa gacaagcgac
tacgtcaaag aagccaagca gctgctgaaa gtgcagaagg cttaccacca gctggatcag
agcttcatcg atacttatat cgacctgctg gagactcgga gaacctacta tgagggacca
ggagaaggga gccccttcgg atggaaagac atcaaggaat ggtacgagat gctgatggga
cattgcacct attttccaga agagctgaga agcgtcaagt acgcttataa cgcagatct
tacaacgccc tgaatgacct gaacaacctg gtcatcacca gggatgaaaa cgagaaactg
gaatactatg agaagttcca gatcatcgaa aacgtgttta agcagaagaa aaagcctaca
ctgaaacaga ttgctaagga gatcctggtc aacgaagagg acatcaaggg ctaccgggtg
acaagcactg gaaaaccaga gttcaccaat ctgaaagtgt atcacgatat taaggacatc
acagcacgga aagaaatcat tgagaacgcc gaactgctgg atcagattgc taagatcctg
actatctacc agagctccga ggacatccag gaagagctga ctaacctgaa cagcgagctg
acccaggaag agatcgaaca gattagtaat ctgaaggggt acaccggaac acacaacctg
tccctgaaag ctatcaatct gattctggat gagctgtggc atacaaacga caatcagatt
gcaatcttta accggctgaa gctggtccca aaaaaggtgg acctgagtca gcagaaagag
atcccaacca cactggtgga cgatttcatt ctgtcacccg tggtcaagcg gagcttcatc
cagagcatca aagtgatcaa cgccatcatc aagaagtacg gcctgcccaa tgatatcatt
atcgagctgg ctagggagaa gaacagcaag gacgcacaga agatgatcaa tgagatgcag
aaacgaaacc ggcagaccaa tgaacgcatt gaagagatta tccgaactac cgggaaagag
aacgcaaagt acctgattga aaaaatcaag ctgcacgata tgcaggaggg aaagtgtctg
tattctctgg aggccatccc cctggaggac ctgctgaaca atccattcaa ctacgaggtc
gatcatatta tccccagaag cgtgtccttc gacaattcct ttaacaacaa ggtgctggtc
aagcaggaag agaactctaa aaagggcaat aggactcctt tccagtacct gtctagttca
gattccaaga tctcttacga aacctttaaa aagcacattc tgaatctggc caaaggaaag
ggccgcatca gcaagaccaa aaaggagtac ctgctggaag agcgggacat caacagattc
tccgtccaga aggattttat taaccggaat ctggtggaca caagatacgc tactcgcggc
ctgatgaatc tgctgcgatc ctatttccgg gtgaacaatc tggatgtgaa agtcaagtcc
atcaacggcg ggttcacatc ttttctgagg cgcaaatgga agtttaaaaa ggagcgcaac
aaagggtaca agcaccatgc cgaagatgct ctgattatcg caaatgccga cttcatcttt
aaggagtgga aaaagctgga caaagccaag aaagtgatgg agaaccagat gttcgaagag
aagcaggccg aatctatgcc cgaaatcgag acagaacagg agtacaagga gattttcatc
actcctcacc agatcaagca tatcaaggat ttcaaggact acaagtactc tcaccgggtg
gataaaaagc ccaacagaga gctgatcaat gacaccctgt atagtacaag aaaagacgat
aaggggaata ccctgattgt gaacaatctg aacggactgt acgacaaaga taatgacaag
ctgaaaaagc tgatcaacaa aagtcccgag aagctgctga tgtaccacca tgatcctcag
acatatcaga aactgaagct gattatggag cagtacggcg acgagaagaa cccactgtat
aagtactatg aagagactgg gaactacctg accaagtata gcaaaaagga taatggcccc
gtgatcaaga agatcaagta ctatgggaac aagctgaatg cccatctgga catcacagac
gattacccta acagtcgcaa caaggtggtc aagctgtcac tgaagccata cagattcgat
gtctatctgg acaacggcgt gtataaattt gtgactgtca agaatctgga tgtcatcaaa
aaggagaact actatgaagt gaatagcaag tgctacgaag aggctaaaaa gctgaaaaag
attagcaacc aggcagagtt catcgcctcc ttttacaaca acgacctgat taagatcaat
ggcgaactgt atagggtcat cggggtgaac aatgatctgc tgaaccgcat tgaagtgaat
atgattgaca tcacttaccg agagtatctg gaaaacatga atgataagcg cccccctcga
attatcaaaa caattgccto taagactcag agtatcaaaa agtactcaac cgacattctg
ggaaacctgt atgaggtgaa gagcaaaaag caccctcaga ttatcaaaaa gggctaagaa
ttc
SEQ ID NO: 26
codon optimized nucleic acid sequences encoding S. aureus Cas9
atggccccaaagaagaagcggaaggtcggtatccacggagtcccagcagccaagcggaactacatcct
gggcctggacatcggcatcaccagcgtgggctacggcatcatcgactacgagacacgggacgtgatcg
atgccggcgtgcggctgttcaaagaggccaacgtggaaaacaacgagggcaggcggagcaagagaggc
gccagaaggctgaagcggcggaggcggcatagaatccagagagtgaagaagctgctgttcgactacaa
cctgctgaccgaccacagcgagctgagcggcatcaacccctacgaggccagagtgaagggcctgagcc
agaagctgagcgaggaagagttctctgccgccctgctgcacctggccaagagaagaggcgtgcacaac
gtgaacgaggtggaagaggacaccggcaacgagctgtccaccaaagagcagatcagccggaacagcaa
ggccctggaagagaaatacgtggccgaactgcagctggaacggctgaagaaagacggcgaagtgcggg
gcagcatcaacagattcaagaccagcgactacgtgaaagaagccaaacagctgctgaaggtgcagaag
gcctaccaccagctggaccagagcttcatcgacacctacatcgacctgctggaaacccggcggaccta
ctatgagggacctggcgagggcagccccttcggctggaaggacatcaaagaatggtacgagatgctga
tgggccactgcacctacttccccgaggaactgcggagcgtgaagtacgcctacaacgccgacctgtac
aacgccctgaacgacctgaacaatctcgtgatcaccagggacgagaacgagaagctggaatattacga
gaagttccagatcatcgagaacgtgttcaagcagaagaagaagcccaccctgaagcagatcgccaaag
aaatcctcgtgaacgaagaggatattaagggctacagagtgaccagcaccggcaagcccgagttcacc
aacctgaaggtgtaccacgacatcaaggacattaccgcccggaaagagattattgagaacgccgagct
gctggatcagattgccaagatcctgaccatctaccagagcagcgaggacatccaggaagaactgacca
atctgaactccgagctgacccaggaagagatcgagcagatctctaatctgaagggctataccggcacc
cacaacctgagcctgaaggccatcaacctgatcctggacgagctgtggcacaccaacgacaaccagat
cgctatcttcaaccggctgaagctggtgcccaagaaggtggacctgtcccagcagaaagagatcccca
ccaccctggtggacgacttcatcctgagccccgtcgtgaagagaagcttcatccagagcatcaaagtg
atcaacgccatcatcaagaagtacggcctgcccaacgacatcattatcgagctggcccgcgagaagaa
ctccaaggacgcccagaaaatgatcaacgagatgcagaagcggaaccggcagaccaacgagcggatcg
aggaaatcatccggaccaccggcaaagagaacgccaagtacctgatcgagaagatcaagctgcacgac
atgcaggaaggcaagtgcctgtacagcctggaagccatccctctggaagatctgctgaacaacccctt
caactatgaggtggaccacatcatccccagaagcgtgtccttcgacaacagcttcaacaacaaggtgc
tcgtgaagcaggaagaaaacagcaagaagggcaaccggaccccattccagtacctgagcagcagcgac
agcaagatcagctacgaaaccttcaagaagcacatcctgaatctggccaagggcaagggcagaatcag
caagaccaagaaagagtatctgctggaagaacgggacatcaacaggttctccgtgcagaaagacttca
tcaaccggaacctggtggataccagatacgccaccagaggcctgatgaacctgctgcggagctacttc
agagtgaacaacctggacgtgaaagtgaagtccatcaatggcggcttcaccagctttctgcggcggaa
gtggaagtttaagaaagagcggaacaaggggtacaagcaccacgccgaggacgccctgatcattgcca
acgccgatttcatcttcaaagagtggaagaaactggacaaggccaaaaaagtgatggaaaaccagatg
ttcgaggaaaagcaggccgagagcatgcccgagatcgaaaccgagcaggagtacaaagagatcttcat
caccccccaccagatcaagcacattaaggacttcaaggactacaagtacagccaccgggtggacaaga
agcctaatagagagctgattaacgacaccctgtactccacccggaaggacgacaagggcaacaccctg
atcgtgaacaatctgaacggcctgtacgacaaggacaatgacaagctgaaaaagctgatcaacaagag
ccccgaaaagctgctgatgtaccaccacgacccccagacctaccagaaactgaagctgattatggaac
agtacggcgacgagaagaatcccctgtacaagtactacgaggaaaccgggaactacctgaccaagtac
tccaaaaaggacaacggccccgtgatcaagaagattaagtattacggcaacaaactgaacgcccatct
ggacatcaccgacgactaccccaacagcagaaacaaggtcgtgaagctgtccctgaagccctacagat
tcgacgtgtacctggacaatggcgtgtacaagttcgtgaccgtgaagaatctggatgtgatcaaaaaa
gaaaactactacgaagtgaatagcaagtgctatgaggaagctaagaagctgaagaagatcagcaacca
ggccgagtttatcgcctccttctacaacaacgatctgatcaagatcaacggcgagctgtatagagtga
tcggcgtgaacaacgacctgctgaaccggatcgaagtgaacatgatcgacatcacctaccgcgagtac
ctggaaaacatgaacgacaagaggccccccaggatcattaagacaatcgcctccaagacccagagcat
taagaagtacagcacagacattctgggcaacctgtatgaagtgaaatctaagaagcaccctcagatca
tcaaaaagggcaaaaggccggcggccacgaaaaaggccggccaggcaaaaaagaaaaag
SEQ ID NO: 27
codon optimized nucleic acid sequences encoding S. aureus Cas9
aagcggaactacatcctgggcctggacatcggcatcaccagcgtgggctacggcatcatcgactacga
gacacgggacgtgatcgatgccggcgtgcggctgttcaaagaggccaacgtggaaaacaacgagggca
ggcggagcaagagaggcgccagaaggetgaagcggcggaggcggcatagaatccagagagtgaagaag
ctgctgttcgactacaacctgctgaccgaccacagcgagctgagcggcatcaacccctacgaggccag
agtgaagggcctgagccagaagctgagcgaggaagagttctctgccgccctgctgcacctggccaaga
gaagaggcgtgcacaacgtgaacgaggtggaagaggacaccggcaacgagctgtccaccaaagagcag
atcagccggaacagcaaggccctggaagagaaatacgtggccgaactgcagctggaacggctgaagaa
agacggcgaagtgcggggcagcatcaacagattcaagaccagcgactacgtgaaagaagccaaacagc
tgctgaaggtgcagaaggcctaccaccagctggaccagagcttcatcgacacctacatcgacctgctg
gaaacccggcggacctactatgagggacctggcgagggcagccccttcggctggaaggacatcaaaga
atggtacgagatgctgatgggccactgcacctacttccccgaggaactgcggagcgtgaagtacgcct
acaacgccgacctgtacaacgccctgaacgacctgaacaatctcgtgatcaccagggacgagaacgag
aagctggaatattacgagaagttccagatcatcgagaacgtgttcaagcagaagaagaagcccaccct
gaagcagatcgccaaagaaatcctcgtgaacgaagaggatattaagggctacagagtgaccagcaccg
gcaagcccgagttcaccaacctgaaggtgtaccacgacatcaaggacattaccgcccggaaagagatt
attgagaacgccgagctgctggatcagattgccaagatcctgaccatctaccagagcagcgaggacat
ccaggaagaactgaccaatctgaactccgagctgacccaggaagagatcgagcagatctctaatctga
agggctataccggcacccacaacctgagcctgaaggccatcaacctgatcctggacgagctgtggcac
accaacgacaaccagatcgctatcttcaaccggctgaagctggtgcccaagaaggtggacctgtccca
gcagaaagagatccccaccaccctggtggacgacttcatcctgagccccgtcgtgaagagaagcttca
tccagagcatcaaagtgatcaacgccatcatcaagaagtacggcctgcccaacgacatcattatcgag
ctggcccgcgagaagaactccaaggacgcccagaaaatgatcaacgagatgcagaagcggaaccggca
gaccaacgagcggatcgaggaaatcatccggaccaccggcaaagagaacgccaagtacctgatcgaga
agatcaagctgcacgacatgcaggaaggcaagtgcctgtacagcctggaagccatccctctggaagat
ctgctgaacaaccccttcaactatgaggtggaccacatcatccccagaagcgtgtccttcgacaacag
cttcaacaacaaggtgctcgtgaagcaggaagaaaacagcaagaagggcaaccggaccccattccagt
acctgagcagcagcgacagcaagatcagctacgaaaccttcaagaagcacatcctgaatctggccaag
ggcaagggcagaatcagcaagaccaagaaagagtatctgctggaagaacgggacatcaacaggttctc
cgtgcagaaagacttcatcaaccggaacctggtggataccagatacgccaccagaggcctgatgaacc
tgctgcggagctacttcagagtgaacaacctggacgtgaaagtgaagtccatcaatggcggcttcacc
agctttctgcggcggaagtggaagtttaagaaagagcggaacaaggggtacaagcaccacgccgagga
cgccctgatcattgccaacgccgatttcatcttcaaagagtggaagaaactggacaaggccaaaaaag
tgatggaaaaccagatgttcgaggaaaagcaggccgagagcatgcccgagatcgaaaccgagcaggag
tacaaagagatcttcatcaccccccaccagatcaagcacattaaggacttcaaggactacaagtacag
ccaccgggtggacaagaagcctaatagagagctgattaacgacaccctgtactccacccggaaggacg
acaagggcaacaccetgatcgtgaacaatctgaacggcctgtacgacaaggacaatgacaagctgaaa
aagctgatcaacaagagccccgaaaagctgctgatgtaccaccacgacccccagacctaccagaaact
gaagctgattatggaacagtacggcgacgagaagaatcccctgtacaagtactacgaggaaaccggga
actacctgaccaagtactccaaaaaggacaacggccccgtgatcaagaagattaagtattacggcaac
aaactgaacgcccatctggacatcaccgacgactaccccaacagcagaaacaaggtcgtgaagctgtc
cctgaagccctacagattcgacgtgtacctggacaatggcgtgtacaagttcgtgaccgtgaagaatc
tggatgtgatcaaaaaagaaaactactacgaagtgaatagcaagtgctatgaggaagctaagaagctg
aagaagatcagcaaccaggccgagtttatcgcctccttctacaacaacgatctgatcaagatcaacgg
cgagctgtatagagtgatcggcgtgaacaacgacctgctgaaccggatcgaagtgaacatgatcgaca
tcacctaccgcgagtacctggaaaacatgaacgacaagaggccccccaggatcattaagacaatcgcc
tccaagacccagagcattaagaagtacagcacagacattctgggcaacctgtatgaagtgaaatctaa
gaagcaccctcagatcatcaaaaagggc
SEQ ID NO: 28
Vector (pDO242) encoding codon optimized nucleic acid sequence encoding S. aureus
Cas9
ctaaattgtaagcgttaatattttgttaaaattcgcgttaaatttttgttaaatcagctcatttttta
accaataggccgaaatcggcaaaatcccttataaatcaaaagaatagaccgagatagggttgagtgtt
gttccagtttggaacaagagtccactattaaagaacgtggactccaacgtcaaagggcgaaaaaccgt
ctatcagggcgatggcccactacgtgaaccatcaccctaatcaagttttttggggtcgaggtgccgta
aagcactaaatcggaaccctaaagggagcccccgatttagagcttgacggggaaagccggcgaacgtg
gcgagaaaggaagggaagaaagcgaaaggagcgggcgctagggcgctggcaagtgtagcggtcacgct
gcgcgtaaccaccacacccgccgcgcttaatgcgccgctacagggcgcgtcccattcgccattcaggc
tgcgcaactgttgggaagggcgatcggtgcgggcctcttcgctattacgccagctggcgaaaggggga
tgtgctgcaaggcgattaagttgggtaacgccagggttttcccagtcacgacgttgtaaaacgacggc
cagtgagcgcgcgtaatacgactcactatagggcgaattgggtacCtttaattctagtactatgcaTg
cgttgacattgattattgactagttattaatagtaatcaattacggggtcattagttcatagcccata
tatggagttccgcgttacataacttacggtaaatggcccgcctggctgaccgcccaacgacccccgcc
cattgacgtcaataatgacgtatgttcccatagtaacgccaatagggactttccattgacgtcaatgg
gtggagtatttacggtaaactgcccacttggcagtacatcaagtgtatcatatgccaagtacgccccc
tattgacgtcaatgacggtaaatggcccgcctggcattatgcccagtacatgaccttatgggactttc
ctacttggcagtacatctacgtattagtcatcgctattaccatggtgatgcggttttggcagtacatc
aatgggcgtggatagcggtttgactcacggggatttccaagtctccaccccattgacgtcaatgggag
tttgttttggcaccaaaatcaacgggactttccaaaatgtcgtaacaactccgccccattgacgcaaa
tgggcggtaggcgtgtacggtgggaggtctatataagcagagctctctggctaactaccggtgccacc
ATGAAAAGGAACTACATTCTGGGGCTGGACATCGGGATTACAAGCGTGGGGTATGGGATTATTGACTA
TGAAACAAGGGACGTGATCGACGCAGGCGTCAGACTGTTCAAGGAGGCCAACGTGGAAAACAATGAGG
GACGGAGAAGCAAGAGGGGAGCCAGGCGCCTGAAACGACGGAGAAGGCACAGAATCCAGAGGGTGAAG
AAACTGCTGTTCGATTACAACCTGCTGACCGACCATTCTGAGCTGAGTGGAATTAATCCTTATGAAGC
CAGGGTGAAAGGCCTGAGTCAGAAGCTGTCAGAGGAAGAGTTTTCCGCAGCTCTGCTGCACCTGGCTA
AGCGCCGAGGAGTGCATAACGTCAATGAGGTGGAAGAGGACACCGGCAACGAGCTGTCTACAAAGGAA
CAGATCTCACGCAATAGCAAAGCTCTGGAAGAGAAGTATGTCGCAGAGCTGCAGCTGGAACGGCTGAA
GAAAGATGGCGAGGTGAGAGGGTCAATTAATAGGTTCAAGACAAGCGACTACGTCAAAGAAGCCAAGC
AGCTGCTGAAAGTGCAGAAGGCTTACCACCAGCTGGATCAGAGCTTCATCGATACTTATATCGACCTG
CTGGAGACTCGGAGAACCTACTATGAGGGACCAGGAGAAGGGAGCCCCTTCGGATGGAAAGACATCAA
GGAATGGTACGAGATGOTGATGGGACATTGCACCTATTTTCCAGAAGAGCTGAGAAGCGTCAAGTACG
CTTATAACGCAGATCTGTACAACGCCCTGAATGACCTGAACAACCTGGTCATCACCAGGGATGAAAAC
GAGAAACTGGAATACTATGAGAAGTTCCAGATCATCGAAAACGTGTTTAAGCAGAAGAAAAAGCCTAC
ACTGAAACAGATTGCTAAGGAGATCCTGGTCAACGAAGAGGACATCAAGGGCTACCGGGTGACAAGCA
CTGGAAAACCAGAGTTCACCAATCTGAAAGTGTATCACGATATTAAGGACATCACAGCACGGAAAGAA
ATCATTGAGAACGCCGAACTGCTGGATCAGATTGCTAAGATCCTGACTATCTACCAGAGCTCCGAGGA
CATCCAGGAAGAGCTGACTAACCTGAACAGCGAGCTGACCCAGGAAGAGATCGAACAGATTAGTAATC
TGAAGGGGTACACCGGAACACACAACCTGTCCCTGAAAGCTATCAATCTGATTCTGGATGAGCTGTGG
CATACAAACGACAATCAGATTGCAATCTTTAACCGGCTGAAGCTGGTCCCAAAAAAGGTGGACCTGAG
TCAGCAGAAAGAGATCCCAACCACACTGGTGGACGATTTCATTCTGTCACCCGTGGTCAAGCGGAGCT
TCATCCAGAGCATCAAAGTGATCAACGCCATCATCAAGAAGTACGGCCTGCCCAATGATATCATTATC
GAGCTGGCTAGGGAGAAGAACAGCAAGGACGCACAGAAGATGATCAATGAGATGCAGAAACGAAACCG
GCAGACCAATGAACGCATTGAAGAGATTATCCGAACTACCGGGAAAGAGAACGCAAAGTACCTGATTG
AAAAAATCAAGCTGCACGATATGCAGGAGGGAAAGTGTCTGTATTCTCTGGAGGCCATCCCCCTGGAG
GACCTGCTGAACAATCCATTCAACTACGAGGTCGATCATATTATCCCCAGAAGCGTGTCCTTCGACAA
TTCCTTTAACAACAAGGTGCTGGTCAAGCAGGAAGAGAACTCTAAAAAGGGCAATAGGACTCCTTTCC
AGTACCTGTCTAGTTCAGATTCCAAGATCTCTTACGAAACCTTTAAAAAGCACATTCTGAATCTGGCC
AAAGGAAAGGGCCGCATCAGCAAGACCAAAAAGGAGTACCTGCTGGAAGAGCGGGACATCAACAGATT
CTCCGTCCAGAAGGATTTTATTAACCGGAATCTGGTGGACACAAGATACGCTACTCGCGGCCTGATGA
ATCTGCTGCGATCCTATTTCCGGGTGAACAATCTGGATGTGAAAGTCAAGTCCATCAACGGCGGGTTC
ACATCTTTTCTGAGGCGCAAATGGAAGTTTAAAAAGGAGCGCAACAAAGGGTACAAGCACCATGCCGA
AGATGCTCTGATTATCGCAAATGCCGACTTCATCTTTAAGGAGTGGAAAAAGCTGGACAAAGCCAAGA
AAGTGATGGAGAACCAGATGTTCGAAGAGAAGCAGGCCGAATCTATGCCCGAAATCGAGACAGAACAG
GAGTACAAGGAGATTTTCATCACTCCTCACCAGATCAAGCATATCAAGGATTTCAAGGACTACAAGTA
CTCTCACCGGGTGGATAAAAAGCCCAACAGAGAGCTGATCAATGACACCCTGTATAGTACAAGAAAAG
ACGATAAGGGGAATACCCTGATTGTGAACAATCTGAACGGACTGTACGACAAAGATAATGACAAGCTG
AAAAAGCTGATCAACAAAAGTCCCGAGAAGCTGCTGATGTACCACCATGATCCTCAGACATATCAGAA
ACTGAAGCTGATTATGGAGCAGTACGGCGACGAGAAGAACCCACTGTATAAGTACTATGAAGAGACTG
GGAACTACCTGACCAAGTATAGCAAAAAGGATAATGGCCCCGTGATCAAGAAGATCAAGTACTATGGG
AACAAGOTGAATGCCCATCTGGACATCACAGACGATTACCCTAACAGTCGCAACAAGGTGGTCAAGCT
GTCACTGAAGCCATACAGATTCGATGTCTATCTGGACAACGGCGTGTATAAATTTGTGACTGTCAAGA
ATCTGGATGTCATCAAAAAGGAGAACTACTATGAAGTGAATAGCAAGTGCTACGAAGAGGCTAAAAAG
CTGAAAAAGATTAGCAACCAGGCAGAGTTCATCGCCTCCTTTTACAACAACGACCTGATTAAGATCAA
TGGCGAACTGTATAGGGTCATCGGGGTGAACAATGATCTGCTGAACCGCATTGAAGTGAATATGATTG
ACATCACTTACCGAGAGTATCTGGAAAACATGAATGATAAGCGCCCCCCTCGAATTATCAAAACAATT
GCCTCTAAGACTCAGAGTATCAAAAAGTACTCAACCGACATTCTGGGAAACCTGTATGAGGTGAAGAG
CAAAAAGCACCCTCAGATTATCAAAAAGGGCagcggaggcaagcgtcctgctgctactaagaaagctg
gtcaagctaagaaaaagaaaggatcctacccatacgatgttccagattacgcttaagaattcctagag
ctcgctgatcagcctcgactgtgccttctagttgccagccatctgttgtttgcccctcccccgtgcct
tccttgaccctggaaggtgccactcccactgtcctttcctaataaaatgaggaaattgcatcgcattg
tctgagtaggtgtcattctattctggggggtggggtggggcaggacagcaagggggaggattgggaag
agaatagcaggcatgctggggaggtagcggccgcCCgcggtggagctccagcttttgttccctttagt
gagggttaattgcgcgcttggcgtaatcatggtcatagctgtttcctgtgtgaaattgttatccgctc
acaattccacacaacatacgagccggaagcataaagtgtaaagcctggggtgcctaatgagtgagcta
actcacattaattgcgttgcgctcactgcccgctttccagtcgggaaacctgtcgtgccagctgcatt
aatgaatcggccaacgcgcggggagaggcggtttgcgtattgggcgctcttccgcttcctcgctcact
gactcgctgcgctcggtcgttcggctgcggcgagcggtatcagctcactcaaaggcggtaatacggtt
atccacagaatcaggggataacgcaggaaagaacatgtgagcaaaaggccagcaaaaggccaggaacc
gtaaaaaggccgcgttgctggcgtttttccataggctccgcccccctgacgagcatcacaaaaatcga
cgctcaagtcagaggtggcgaaacccgacaggactataaagataccaggcgtttccccctggaagctc
cctcgtgcgctctcctgttccgaccctgccgcttaccggatacctgtccgcctttctcccttcgggaa
gcgtggcgctttctcatagctcacgctgtaggtatctcagttcggtgtaggtcgttcgctccaagctg
ggctgtgtgcacgaaccccccgttcagcccgaccgctgcgccttatccggtaactatcgtcttgagtc
caacccggtaagacacgacttatcgccactggcagcagccactggtaacaggattagcagagcgaggt
atgtaggcggtgctacagagttcttgaagtggtggcctaactacggctacactagaaggacagtattt
ggtatctgcgctctgctgaagccagttaccttcggaaaaagagttggtagctcttgatccggcaaaca
aaccaccgctggtagcggtggtttttttgtttgcaagcagcagattacgcgcagaaaaaaaggatctc
aagaagatcctttgatcttttctacggggtctgacgctcagtggaacgaaaactcacgttaagggatt
ttggtcatgagattatcaaaaaggatcttcacctagatccttttaaattaaaaatgaagttttaaatc
aatctaaagtatatatgagtaaacttggtctgacagttaccaatgettaatcagtgaggcacctatct
cagcgatctgtctatttcgttcatccatagttgcctgactccccgtcgtgtagataactacgatacgg
gagggcttaccatctggccccagtgctgcaatgataccgcgagacccacgctcaccggctccagattt
atcagcaataaaccagccagccggaagggccgagcgcagaagtggtcctgcaactttatccgcctcca
tccagtctattaattgttgccgggaagctagagtaagtagttcgccagttaatagtttgcgcaacgtt
gttgccattgctacaggcatcgtggtgtcacgctcgtcgtttggtatggcttcattcagctccggttc
ccaacgatcaaggcgagttacatgatcccccatgttgtgcaaaaaagcggttagctccttcggtcctc
cgatcgttgtcagaagtaagttggccgcagtgttatcactcatggttatggcagcactgcataattct
cttactgtcatgccatccgtaagatgcttttctgtgactggtgagtactcaaccaagtcattctgaga
atagtgtatgcggcgaccgagttgctcttgcccggcgtcaatacgggataataccgcgccacatagca
gaactttaaaagtgctcatcattggaaaacgttcttcggggcgaaaactctcaaggatcttaccgctg
ttgagatccagttcgatgtaacccactcgtgcacccaactgatcttcagcatcttttactttcaccag
cgtttctgggtgagcaaaaacaggaaggcaaaatgccgcaaaaaagggaataagggcgacacggaaat
gttgaatactcatactcttcctttttcaatattattgaagcatttatcagggttattgtctcatgagc
ggatacatatttgaatgtatttagaaaaataaacaaataggggttccgcgcacatttccccgaaaagt
gccac

| | | | | |
|---|---|---|---|---|
| | Target/ | | Spacer Sequence | |
| Guide # | Original gRNA | Cas9 | (Sequence the gRNA targets and binds) | nt |

First Round Screening:

| | | | | |
|---|---|---|---|---|
| gAP1 | Dyst (Intron51) | SaCas9 | CTTTACTTTGTATTATGTAAA | 21 |
| | | | (SEQ ID NO: 29) | |
| gAP2 | Dyst (Intron51) | SaCas9 | TTTGAAATATTTTTGATATCT | 21 |
| | | | (SEQ ID NO: 30) | |
| gAP3 | Dyst (Intron51) | SaCas9 | TTTAAGTAATCCGAGGTACTC | 21 |
| | | | (SEQ ID NO: 31) | |
| gAP4 | Dyst (Intron51) | SaCas9 | TTTAAATACATTGTCGTAATT | 21 |
| | | | (SEQ ID NO: 32) | |
| 9AP5 | Dyst (Intron51) | SaCas9 | TACCTTAATTTTGACGTCACA | 21 |
| | | | (SEQ ID NO: 33) | |
| gAP6 | Dyst (Intron51) | SaCas9 | ATTTGACAGGTGAGAAATCTC | 21 |
| | | | (SEQ ID NO: 34) | |
| gAP7 | Dyst (Intron51) | SaCas9 | TCATTTATAATACAGGGGAAT | 21 |
| | | | (SEQ ID NO: 35) | |
| gAP8 | Dyst (Intron51) | SaCas9 | TTAAAGTCATTTATAATACAG | 21 |
| | | | (SEQ ID NO: 36) | |
| gAP9 | Dyst (Intron51) | SaCas9 | AAATAGACACTGAAGAAAGGG | 21 |
| | | | (SEQ ID NO: 37) | |
| gAP10 | Dyst (Intron51) | SaCas9 | CCCCAATTAAAATAAAATTTA | 21 |
| | | | (SEQ ID NO: 38) | |

Second Round Screening:

| | | | | |
|---|---|---|---|---|
| gAP11 | g3 | SaCas9 | TAAGTAATCCGAGGTACTC | 19 |
| | | | (SEQ ID NO: 39) | |
| gAP12 | g3 | SaCas9 | TTAAGTAATCCGAGGTACTC | 20 |
| | | | SEQ ID NO: 40) | |
| gAP13 | g3 | SaCas9 | GTTTAAGTAATCCGAGGTACTC | 22 |
| | | | (SEQ ID NO: 41) | |
| gAP14 | g3 | SaCas9 | GGTTTAAGTAATCCGAGGTACTC | 23 |
| | | | (SEQ ID NO: 42) | |
| gAP15 | g6 | SaCas9 | TTGACAGGTGAGAAATCTC | 19 |
| | | | (SEQ ID NO: 43) | |
| gAP16 | g6 | SaCas9 | TTTGACAGGTGAGAAATCTC | 20 |
| | | | (SEQ ID NO: 44) | |
| gAP17 | g6 | SaCas9 | CATTTGACAGGTGAGAAATCTC | 22 |
| | | | (SEQ ID NO: 45) | |
| gAP18 | g6 | SaCas9 | TCATTTGACAGGTGAGAAATCTC | 23 |
| | | | (SEQ ID NO: 46) | |
| gAP19 | g7 | SaCas9 | ATTTATAATACAGGGGAAT | 19 |
| | | | (SEQ ID NO: 47) | |
| gAP20 | g7 | SaCas9 | CATTTATAATACAGGGGAAT | 20 |
| | | | (SEQ ID NO: 48) | |
| gAP21 | g7 | SaCas9 | GTCATTTATAATACAGGGGAAT | 22 |
| | | | (SEQ ID NO: 49) | |
| gAP22 | g7 | SaCas9 | AGTCATTTATAATACAGGGGAAT | 23 |
| | | | (SEQ ID NO: 50) | |
| gAP23 | scrambled | SaCas9 | GCACTACCAGAGCTAACTCA | 20 |
| | | | (SEQ ID NO: 51) | |

SEQ ID NO: 52
SaCas9 gRNA scaffold
GTTTTAGTACTCTGGAAACAGAATCTACTAAAACAAGGCAAAATGCCGTGTTTATCTCGTCAACTTGT
TGGCGAGA
SEQ ID NO: 53
Exon 52
GCAACAATGCAGGATTTGGAACAGAGGCGTCCCCAGTTGGAAGAACTCATTACCGCTGCCCAAAATTT
GAAAAACAAGACCAGCAATCAAGAGGCTAGAACAATCATTACGGATCGAA
SEQ ID NO: 54
Donor sequence comprising exon 52
GTTAAATTGTTTTCTATAAACCCTTATACAGTAACATCTTTTTTATTTCTAAAAGTGTTTTGGCTGGT
CTCACAATTGTACTTTACTTTGTATTATGTAAAAGGAATACACAACGOTGAAGAACCCTGATACTAAG
GGATATTTGTTCTTACAGGCAACAATGCAGGATTTGGAACAGAGGCGTCCCCAGTTGGAAGAACTCAT
TACCGCTGCCCAAAATTTGAAAAACAAGACCAGCAATCAAGAGGCTAGAACAATCATTACGGATCGAA
GTAAGTTTTTTAACAAGCATGGGACACACAAAGCAAGATGCATGACAAGTTTCAATAAAAACTTAAGT
TCATATATCCCCCTCACATTTATAAAAATAATGTGAAATAATTGTAAATGATAACAATTGTGCTGAGA
TTTTCAGTCCATAATGTTACCTTTTAATAAATGAATGTAATTCCATTGAATAGAAGAAATAC
SEQ ID NO: 55
Super exon (exons 52-79)
GCAACAATGCAGGATTTGGAACAGAGGCGTCCCCAGTTGGAAGAACTCATTACCGCTGCCCAAAATTT
GAAAAACAAGACCAGCAATCAAGAGGCTAGAACAATCATTACGGATCGAATTGAAAGAATTCAGAATC
AGTGGGATGAAGTACAAGAACACCTTCAGAACCGGAGGCAACAGTTGAATGAAATGTTAAAGGATTCA
ACACAATGGCTGGAAGCTAAGGAAGAAGCTGAGCAGGTCTTAGGACAGGCCAGAGCCAAGCTTGAGTC
ATGGAAGGAGGGTCCCTATACAGTAGATGCAATCCAAAAGAAAATCACAGAAACCAAGCAGTTGGCCA
AAGACCTCCGCCAGTGGCAGACAAATGTAGATGTGGCAAATGACTTGGCCCTGAAACTTCTCCGGGAT
TATTCTGCAGATGATACCAGAAAAGTCCACATGATAACAGAGAATATCAATGCCTCTTGGAGAAGCAT
TCATAAAAGGGTGAGTGAGCGAGAGGCTGCTTTGGAAGAAACTCATAGATTACTGCAACAGTTCCCCC
TGGACCTGGAAAAGTTTCTTGCCTGGCTTACAGAAGCTGAAACAACTGCCAATGTCCTACAGGATGCT
ACCCGTAAGGAAAGGCTCCTAGAAGACTCCAAGGGAGTAAAAGAGCTGATGAAACAATGGCAAGACCT
CCAAGGTGAAATTGAAGCTCACACAGATGTTTATCACAACCTGGATGAAAACAGCCAAAAAATCCTGA
GATCCCTGGAAGGTTCCGATGATGCAGTCCTGTTACAAAGACGTTTGGATAACATGAACTTCAAGTGG
AGTGAACTTCGGAAAAAGTCTCTCAACATTAGGTCCCATTTGGAAGCCAGTTCTGACCAGTGGAAGCG
TCTGCACCTTTCTCTGCAGGAACTTCTGGTGTGGCTACAGCTGAAAGATGATGAATTAAGCCGGCAGG
CACCTATTGGAGGCGACTTTCCAGCAGTTCAGAAGCAGAACGATGTACATAGGGCCTTCAAGAGGGAA
TTGAAAACTAAAGAACCTGTAATCATGAGTACTCTTGAGACTGTACGAATATTTCTGACAGAGCAGCC
TTTGGAAGGACTAGAGAAACTCTACCAGGAGCCCAGAGAGCTGCCTCCTGAGGAGAGAGCCCAGAATG
TCACTCGGCTTCTACGAAAGCAGGCTGAGGAGGTCAATACTGAGTGGGAAAAATTGAACCTGCACTCC
GCTGACTGGCAGAGAAAAATAGATGAGACCCTTGAAAGACTCCAGGAACTTCAAGAGGCCACGGATGA
GCTGGACCTCAAGCTGCGCCAAGCTGAGGTGATCAAGGGATCCTGGCAGCCCGTGGGCGATCTCCTCA
TTGACTCTCTCCAAGATCACCTCGAGAAAGTCAAGGCACTTCGAGGAGAAATTGCGCCTCTGAAAGAG
AACGTGAGCCACGTCAATGACCTTGCTCGCCAGCTTACCACTTTGGGCATTCAGCTCTCACCGTATAA
CCTCAGCACTCTGGAAGACCTGAACACCAGATGGAAGCTTCTGCAGGTGGCCGTCGAGGACCGAGTCA
GGCAGCTGCATGAAGCCCACAGGGACTTTGGTCCAGCATCTCAGCACTTTCTTTCCACGTCTGTCCAG
GGTCCCTGGGAGAGAGCCATCTCGCCAAACAAAGTGCCCTACTATATCAACCACGAGACTCAAACAAC
TTGCTGGGACCATCCCAAAATGACAGAGCTCTACCAGTCTTTAGCTGACCTGAATAATGTCAGATTCT
CAGCTTATAGGACTGCCATGAAACTCCGAAGACTGCAGAAGGCCCTTTGCTTGGATCTCTTGAGCCTG
TCAGCTGCATGTGATGCCTTGGACCAGCACAACCTCAAGCAAAATGACCAGCCCATGGATATCCTGCA
GATTATTAATTGTTTGACCACTATTTATGACCGCCTGGAGCAAGAGCACAACAATTTGGTCAACGTCC
CTCTCTGCGTGGATATGTGTCTGAACTGGCTGCTGAATGTTTATGATACGGGACGAACAGGGAGGATC
CGTGTCCTGTCTTTTAAAACTGGCATCATTTCCCTGTGTAAAGCACATTTGGAAGACAAGTACAGATA
CCTTTTCAAGCAAGTGGCAAGTTCAACAGGATTTTGTGACCAGCGCAGGCTGGGCCTCCTTCTGCATG
ATTCTATCCAAATTCCAAGACAGTTGGGTGAAGTTGCATCCTTTGGGGGCAGTAACATTGAGCCAAGT
GTCCGGAGCTGCTTCCAATTTGCTAATAATAAGCCAGAGATCGAAGCGGCCCTCTTCCTAGACTGGAT
GAGACTGGAACCCCAGTCCATGGTGTGGCTGCCCGTCCTGCACAGAGTGGCTGCTGCAGAAACTGCCA
AGCATCAGGCCAAATGTAACATCTGCAAAGAGTGTCCAATCATTGGATTCAGGTACAGGAGTCTAAAG
CACTTTAATTATGACATCTGCCAAAGCTGCTTTTTTTCTGGTCGAGTTGCAAAAGGCCATAAAATGCA
CTATCCCATGGTGGAATATTGCACTCCGACTACATCAGGAGAAGATGTTCGAGACTTTGCCAAGGTAC
TAAAAAACAAATTTCGAACCAAAAGGTATTTTGCGAAGCATCCCCGAATGGGCTACCTGCCAGTGCAG
ACTGTCTTAGAGGGGGACAACATGGAAACTCCCGTTACTCTGATCAACTTCTGGCCAGTAGATTCTGC
GCCTGCCTCGTCCCCTCAGCTTTCACACGATGATACTCATTCACGCATTGAACATTATGCTAGCAGGC
TAGCAGAAATGGAAAACAGCAATGGATCTTATCTAAATGATAGCATCTCTCCTAATGAGAGCATAGAT
GATGAACATTTGTTAATCCAGCATTACTGCCAAAGTTTGAACCAGGACTCCCCCCTGAGCCAGCCTCG
TAGTCCTGCCCAGATCTTGATTTCCTTAGAGAGTGAGGAAAGAGGGGAGCTAGAGAGAATCCTAGCAG
ATCTTGAGGAAGAAAACAGGAATCTGCAAGCAGAATATGACCGTCTAAAGCAGCAGCACGAACATAAA
GGCCTGTCCCCACTGCCGTCCCCTCCTGAAATGATGCCCACCTCTCCCCAGAGTCCCCGGGATGCTGA
GCTCATTGCTGAGGCCAAGCTACTGCGTCAACACAAAGGCCGCCTGGAAGCCAGGATGCAAATCCTGG
AAGACCACAATAAACAGCTGGAGTCACAGTTACACAGGCTAAGGCAGCTGCTGGAGCAACCCCAGGCA
GAGGCCAAAGTGAATGGCACAACGGTGTCCTCTCCTTCTACCTCTCTACAGAGGTCCGACAGCAGTCA
GCCTATGCTGCTCCGAGTGGTTGGCAGTCAAACTTCGGACTCCATGGGTGAGGAAGATCTTCTCAGTC
CTCCCCAGGACACAAGCACAGGGTTAGAGGAGGTGATGGAGCAACTCAACAACTCCTTCCCTAGTTCA
AGAGGAAGAAATACCOCTGGAAAGCCAATGAGAGAGGACACAATGTAG
SEQ ID NO: 56
Donor sequence including super exon (exons 52-79)
gTTAAtTTGcgTTCTAgccACCgagATACAGTAACATCTTTTTTATTTCTAAAAGTGTTTTGGCTGGT
CTCACAATTGTACTTTACTTTGTATTATGTAAAAGGAATACACAACGOTGAAGAACCCTGATACTAAG
GGATATTTGTTCTTACAGGCAACAATGCAGGATTTGGAACAGAGGCGTCCCCAGTTGGAAGAACTCAT
TACCGCTGCCCAAAATTTGAAAAACAAGACCAGCAATCAAGAGGCTAGAACAATCATTACGGATCGAA
TTGAAAGAATTCAGAATCAGTGGGATGAAGTACAAGAACACCTTCAGAACCGGAGGCAACAGTTGAAT
GAAATGTTAAAGGATTCAACACAATGGCTGGAAGCTAAGGAAGAAGCTGAGCAGGTCTTAGGACAGGC
CAGAGCCAAGCTTGAGTCATGGAAGGAGGGTCCCTATACAGTAGATGCAATCCAAAAGAAAATCACAG
AAACCAAGCAGTTGGCCAAAGACCTCCGCCAGTGGCAGACAAATGTAGATGTGGCAAATGACTTGGCC
CTGAAACTTCTCCGGGATTATTCTGCAGATGATACCAGAAAAGTCCACATGATAACAGAGAATATCAA
TGCCTCTTGGAGAAGCATTCATAAAAGGGTGAGTGAGCGAGAGGCTGCTTTGGAAGAAACTCATAGAT
TACTGCAACAGTTCCCCCTGGACCTGGAAAAGTTTCTTGCCTGGCTTACAGAAGCTGAAACAACTGCC
AATGTCCTACAGGATGCTACCCGTAAGGAAAGGCTCCTAGAAGACTCCAAGGGAGTAAAAGAGCTGAT
GAAACAATGGCAAGACCTCCAAGGTGAAATTGAAGCTCACACAGATGTTTATCACAACCTGGATGAAA
ACAGCCAAAAAATCCTGAGATCCCTGGAAGGTTCCGATGATGCAGTCCTGTTACAAAGACGTTTGGAT
AACATGAACTTCAAGTGGAGTGAACTTCGGAAAAAGTCTCTCAACATTAGGTCCCATTTGGAAGCCAG
TTCTGACCAGTGGAAGCGTCTGCACCTTTCTCTGCAGGAACTTCTGGTGTGGCTACAGCTGAAAGATG
ATGAATTAAGCCGGCAGGCACCTATTGGAGGCGACTTTCCAGCAGTTCAGAAGCAGAACGATGTACAT
AGGGCCTTCAAGAGGGAATTGAAAACTAAAGAACCTGTAATCATGAGTACTCTTGAGACTGTACGAAT
ATTTCTGACAGAGCAGCCTTTGGAAGGACTAGAGAAACTCTACCAGGAGCCCAGAGAGCTGCCTCCTG
AGGAGAGAGCCCAGAATGTCACTCGGCTTCTACGAAAGCAGGCTGAGGAGGTCAATACTGAGTGGGAA
AAATTGAACCTGCACTCCGCTGACTGGCAGAGAAAAATAGATGAGACCCTTGAAAGACTCCAGGAACT
TCAAGAGGCCACGGATGAGCTGGACCTCAAGCTGCGCCAAGCTGAGGTGATCAAGGGATCCTGGCAGC
CCGTGGGCGATCTCCTCATTGACTCTCTCCAAGATCACCTCGAGAAAGTCAAGGCACTTCGAGGAGAA
ATTGCGCCTCTGAAAGAGAACGTGAGCCACGTCAATGACCTTGCTCGCCAGCTTACCACTTTGGGCAT
TCAGCTCTCACCGTATAACCTCAGCACTCTGGAAGACCTGAACACCAGATGGAAGCTTCTGCAGGTGG
CCGTCGAGGACCGAGTCAGGCAGCTGCATGAAGCCCACAGGGACTTTGGTCCAGCATCTCAGCACTTT
CTTTCCACGTCTGTCCAGGGTCCCTGGGAGAGAGCCATCTCGCCAAACAAAGTGCCCTACTATATCAA
CCACGAGACTCAAACAACTTGCTGGGACCATCCCAAAATGACAGAGCTCTACCAGTCTTTAGCTGACC
TGAATAATGTCAGATTCTCAGCTTATAGGACTGCCATGAAACTCCGAAGACTGCAGAAGGCCCTTTGC
TTGGATCTCTTGAGCCTGTCAGCTGCATGTGATGCCTTGGACCAGCACAACCTCAAGCAAAATGACCA
GCCCATGGATATCCTGCAGATTATTAATTGTTTGACCACTATTTATGACCGCCTGGAGCAAGAGCACA
ACAATTTGGTCAACGTCCCTCTCTGCGTGGATATGTGTCTGAACTGGCTGCTGAATGTTTATGATACG
GGACGAACAGGGAGGATCCGTGTCCTGTCTTTTAAAACTGGCATCATTTCCCTGTGTAAAGCACATTT
GGAAGACAAGTACAGATACCTTTTCAAGCAAGTGGCAAGTTCAACAGGATTTTGTGACCAGCGCAGGC
TGGGCCTCCTTCTGCATGATTCTATCCAAATTCCAAGACAGTTGGGTGAAGTTGCATCCTTTGGGGGC
AGTAACATTGAGCCAAGTGTCCGGAGCTGCTTCCAATTTGCTAATAATAAGCCAGAGATCGAAGCGGC
CCTCTTCCTAGACTGGATGAGACTGGAACCCCAGTCCATGGTGTGGCTGCCCGTCCTGCACAGAGTGG
CTGCTGCAGAAACTGCCAAGCATCAGGCCAAATGTAACATCTGCAAAGAGTGTCCAATCATTGGATTC
AGGTACAGGAGTCTAAAGCACTTTAATTATGACATCTGCCAAAGCTGCTTTTTTTCTGGTCGAGTTGC
AAAAGGCCATAAAATGCACTATCCCATGGTGGAATATTGCACTCCGACTACATCAGGAGAAGATGTTC
GAGACTTTGCCAAGGTACTAAAAAACAAATTTCGAACCAAAAGGTATTTTGCGAAGCATCCCCGAATG
GGCTACCTGCCAGTGCAGACTGTCTTAGAGGGGGACAACATGGAAACTCCCGTTACTCTGATCAACTT
CTGGCCAGTAGATTCTGCGCCTGCCTCGTCCCCTCAGCTTTCACACGATGATACTCATTCACGCATTG
AACATTATGCTAGCAGGCTAGCAGAAATGGAAAACAGCAATGGATCTTATCTAAATGATAGCATCTCT
CCTAATGAGAGCATAGATGATGAACATTTGTTAATCCAGCATTACTGCCAAAGTTTGAACCAGGACTC
CCCCCTGAGCCAGCCTCGTAGTCCTGCCCAGATCTTGATTTCCTTAGAGAGTGAGGAAAGAGGGGAGC
TAGAGAGAATCCTAGCAGATOTTGAGGAAGAAAACAGGAATCTGCAAGCAGAATATGACCGTCTAAAG
CAGCAGCACGAACATAAAGGCCTGTCCCCACTGCCGTCCCCTCCTGAAATGATGCCCACCTCTCCCCA
GAGTCCCCGGGATGCTGAGCTCATTGCTGAGGCCAAGCTACTGCGTCAACACAAAGGCCGCCTGGAAG
CCAGGATGCAAATCCTGGAAGACCACAATAAACAGCTGGAGTCACAGTTACACAGGCTAAGGCAGCTG
CTGGAGCAACCCCAGGCAGAGGCCAAAGTGAATGGCACAACGGTGTCCTCTCCTTCTACCTCTCTACA
GAGGTCCGACAGCAGTCAGCCTATGCTGCTCCGAGTGGTTGGCAGTCAAACTTCGGACTCCATGGGTG
AGGAAGATCTTCTCAGTCCTCCCCAGGACACAAGCACAGGGTTAGAGGAGGTGATGGAGCAACTCAAC
AACTCCTTCCCTAGTTCAAGAGGAAGAAATACCCCTGGAAAGCCAATGAGAGAGGACACAATGTAGTC
GTTTAAACCGCTGATCAGCCTCGAAACTTGTTTATTGCAGCTTATAATGGTTACAAATAAAGCAATAG
CATCACAAATTTCACAAATAAAGCATTTTTTTCACTGCATTCTAGTTGTGGTTTGTCCAAACTCATCA
ATGTATCTTAGTAAGTTTTTTAACAAGCATGGGACACACAAAGCAAGATGCATGACAAGTTTCAATAA
AAACTTAAGTTCATATATCCCCCTCACATTTATAAAAATAATGTGAAATAATTGTAAATGATAACAAT
TGTGCTGAGATTTTCAGTCCATAATGTTACCTTTTAATAAATGAATGTAATTCCATTGAATAGAAGAA
ATAC
SEQ ID NO: 57
AAV expression cassette for version 1 exon52 donor sequence with gRNA7:
AAV ITR, U6 PROMOTER, [symbol] PAM (ATTCCT), SaCas9 gRNA
SCAFFOLD, donor sequence, exon52
TTGGCCACTCCCTCTCTGCGCGCTCGCTCGCTCACTGAGGCCGGGCGACCAAAGGTCGCCCG
ACGCCCGGGCTTTGCCCGGGCGGCCTCAGTGAGCGAGCGAGCGCGCAGAGAGGGAGTGGCCA
ACTCCATCACTAGGGGTTCCTCAGATCTGAATTCGGTACCTTCCTAGGGCCTATTTCCCATG
ATTCCTTCATATTTGCATATACGATACAAGGCTGTTAGAGAGATAATTGGAATTAATTTGAC
TGTAAACACAAAGATATTAGTACAAAATACGTGACGTAGAAAGTAATAATTTCTTGGGTAGT
TTGCAGTTTTAAAATTATGTTTTAAAATGGACTATCATATGCTTACCGTAACTTGAAAGTAT
TTCGATTTCTTGGCTTTATATATCTTGTGGAAAGGACGAAACACCG [symbol] [symbol]
GTTTTAGTACTCTGGAAACAGAATCTACTAAAACAAGGCAAAATGCCGTGTTTATCT
CGTCAACTTGTTGGCGAGATTTTTTTCTAGACCCAGCTTTCTTGTACAAAGTTGGCGTTTAA
AC [symbol] gttaaattgttttctataaacccttatacagta
acatcttttttatttctaaaagtgttttggctggtctcacaattgtactttactttgtatta
tgtaaaaggaatacacaacgctgaagaaccctgatactaagggatatttgttcttacaggca
acaatgcaggatttggaacagaggcgtccccagttggaagaactcattaccgctgcccaaaa
tttgaaaaacaagaccagcaatcaagaggctagaacaatcattacggatcgaagtaagtttt
ttaacaagcatgggacacacaaagcaagatgcatgacaagtttcaataaaaacttaagttca
tatatccccctcacatttataaaaataatgtgaaataattgtaaatgataacaattgtgctg
agattttcagtccataatgttaccttttaataaatgaatgtaattccattgaatagaagaaa
tacATTCCT [symbol] GCTAGCTCGGAGAGACGACATCTAGAATTAAA
CTGTCACTATCGATTACTAATTTTTTGCTCATAATAGAAGCAGCGATTAAAGGAATAGAATC
AACAGTTCCAGTAACATCTCTTAGTGCATACATTTTTTTATCAGCAGGAACAATATCATCTG
ACTGACCTGTGATGCTCATTCCAACTTCATTAATTGTTTTAATGAATTTTTCTTTAGATAAT
TCACTTGTTCAACCTTTACATGACTCTAATTTATCAATAGTACCACCAGTTACTCCAAGTCC
TCTACCAGAAAGTTTACAAACCTTTACTCCATAACTTGCAACTAACGGACTATATACTAAAC
TTGTTTTGTCTCCAACTCCGCCAGTTGAATGCTTATCAGCTTTTAAACCTGTAACCTCACTG
ACATCATAAACATATCCTGATTCAACATAAGATTGGGTTAATGCTAAAGTTTCTGCTTTGGT
CATTCCATTAAAATAAACCGCCATAGCAAAAGCAGCCATTTGATAATCTGTTACATTATTTT
TAACGTAACTGTTTATCAATCATTTAATTTCTTCAGCTGATAATTCTATTGAATGTTTCTTT
TTTTCTATAATTTCACTAAAACTGTAGTTCATAAGTCTCCTTTTGTAAGAGTGCACAATATT
TACACCATTACTCTTTCTACTATATTATAATAGAATAGACATATAAAAAACATAAGGAGTAC
AAATGGTTTTTGATAAAAATAACAAAGTTTATAGTGAATGAATAAATAGCCAAAAATTGGAT
GATGAGTTGAAAAGCCTTTTAGTAAATGCTACTGATGATGAATTGCATGCAGCATTTGAAGG
AATAGAGTTAGAATTTGGAACAGCAGGTATAAGAGGTATTCTTGGAGCAGGACCTGGAAGAT
TTAACGTTTACACTGTTAAAAAAGTTACTATTGCATTTGCAGAATTATTAAAACAAAATTAC
CCAAATAGGTTGAATGATGGAATAGTTGTTGGTCATGATAACCGTCATAATTCTAAACAGTT
TGCAAAAGTTGTAGCCGAAGTTTTATCAAGCTTGTGAAATAGCTGTTGAAGCTGGATTAGAA
TTTGTTAAAACATCAACAGGATTTTCAAAATCAGGTGCAACATTTGAAGATGTTAAACTAAT
GAAGTCAGTTGTTAAAGACAATGOTTTAGTTAAAGCAGCTGGTGGAGTTAGAACATTTGAAG
ATGCTCAAAAAATGATTGAAGCAGGAGCTGACCGCTTAGGAACAAGTGGTGGAGTAGCTATT
ATTAAAGGTGAAGAAAACAACGCGAGTTACTAAAACTAGCGTTTTTTTATTTTGCTCATTTT
TATTAAAAGTTTGCAAAAAGGAACATAAAAATTCTAATTATTGATACTAAAGTTATTAAAAA
GAAGATTTTGGTTGATTTTATAAAGGTCATAGAATATAATATTTTAGCATGTGTATTTTGTG
TGCTCATTTACAACCGTCTCGCGGCCGCGGGGATCCAGACATGATAAGATACATTGATGAGT
TTGGACAAACCACAACTAGAATGCAGTGAAAAAAATGCTTTATTTGTGAAATTTGTGATGCT
ATTGCTTTATTTGTAACCATTATAAGCTGCAATAAACAAGTTAACAACAACAATTGCATTCA
TTTTATGTTTCAGGTTCAGGGGGAGGTGTGGGAGGTTTTTTAGTCGACCTCGAGCAGTGTGG
TTTTGCAAGAGGAAGCAAAAAGCCTCTCCACCCAGGCCTGGAATGTTTCCACCCAAGTCGAA
GGCAGTGTGGTTTTGCAAGAGGAAGCAAAAAGCCTCTCCACCCAGGCCTGGAATGTTTCCAC
CCAATGTCGAGCAACCCCGCCCAGCGTCTTGTCATTGGCGAATTCGAACACGCAGATGCAGT
CGGGGCGGCGCGGTCCCAGGTCCACTTCGCATATTAAGGTGACGCGTGTGGCCTCGAACACC
GAGCGACCCTGCAGCCAATATGGGATCGGCCATTGAACAAGATGGATTGCACGCAGGTTCTC
CGGCCGCTTGGGTGGAGAGGCTATTCGGCTATGACTGGGCACAACAGACAATCGGCTGCTCT
GATGCCGCCGTGTTCCGGCTGTCAGCGCAGGGGCGCCCGGTTCTTTTTGTCAAGACCGACCT
GTCCGGTGCCCTGAATGAACTGCAGGACGAGGCAGCGCGGCTATCGTGGCTGGCCACGACGG
GCGTTCCTTGCGCAGCTGTGCTCGACGTTGTCACTGAAGCGGGAAGGGACTGGCTGCTATTG
GGCGAAGTGCCGGGGCAGGATCTCCTGTCATCTCACCTTGCTCCTGCCGAGAAAGTATCCAT
CATGGCTGATGCAATGCGGCGGCTGCATACGCTTGATCCGGCTACCTGCCCATTCGACCACC
AAGCGAAACATCGCATCGAGCGAGCACGTACTCGGATGGAAGCCGGTCTTGTCGATCAGGAT
GATCTGGACGAAGAGCATCAGGGGCTCGCGCCAGCCGAACTGTTCGCCAGGCTCAAGGCGCG
CATGCCCGACGGCGAGGATCTCGTCGTGACCCATGGCGATGCCTGCTTGCCGAATATCATGG
TGGAAAATGGCCGCTTTTCTGGATTCATCGACTGTGGCCGGCTGGGTGTGGCGGACCGCTAT
CAGGACATAGCGTTGGCTACCCGTGATATTGCTGAAGAGCTTGGCGGCGAATGGGCTGACCG
CTTCCTCGTGCTTTACGGTATCGCCGCTCCCGATTCGCAGCGCATCGCCTTCTATCGCCTTC
TTGACGAGTTCTTCTGAGGGGATCCGTCGACTAGAGCTCGCTGATCAGCCTCGACTGTGCCT
TCTAGTTGCCAGCCATCTGTTGTTTGCCCCTCCCCCGTGCCTTCCTTGACCCTGGAAGGTGC
CACTCCCACTGTCCTTTCCTAATAAAATGAGGAAATTGCATCGCATTGTCTGAGTAGGTGTC
ATTCTATTCTGGGGGGTGGGGTGGGGCAGGACAGCAAGGGGGAGGATTGGGAAGACAATAGC
AGGCATGCTGGGGAGAGATCTAGGAACCCCTAGTGATGGAGTTGGCCACTCCCTCTCTGCGC
GCTCGCTCGCTCACTGAGGCCGCCCGGGCAAAGCCCGGGCGTCGGGCGACCTTTGGTCGCCC
GGCCTCAGTGAGCGAGCGAGCGCGCAGAGAGGGAGTGGCCAA
SEQ ID NO: 58
AAV expression cassette for version 1 exon52 donor sequence with gRNA12:
AAV ITR, U6 PROMOTER, [symbol] PAM, SaCas9 gRNA SCAFFOLD, donor
sequence, exon52
TTGGCCACTCCCTCTCTGCGCGCTCGCTCGCTCACTGAGGCCGGGCGACCAAAGGTCGCCCG
ACGCCCGGGCTTTGCCCGGGCGGCCTCAGTGAGCGAGCGAGCGCGCAGAGAGGGAGTGGCCA
ACTCCATCACTAGGGGTTCCTCAGATCTGAATTCGGTACCTTCCTAGGGCCTATTTCCCATG
ATTCCTTCATATTTGCATATACGATACAAGGCTGTTAGAGAGATAATTGGAATTAATTTGAC
TGTAAACACAAAGATATTAGTACAAAATACGTGACGTAGAAAGTAATAATTTCTTGGGTAGT
TTGCAGTTTTAAAATTATGTTTTAAAATGGACTATCATATGCTTACCGTAACTTGAAAGTAT
TTCGATTTOTTGGCTTTATATATCTTGTGGAAAGGACGAAACACCG [symbol] [symbol]
GTTTTAGTACTCTGGAAACAGAATCTACTAAAACAAGGCAAAATGCCGTGTTTATCTC
GTCAACTTGTTGGCGAGATTTTTTTCTAGACCCAGCTTTCTTGTACAAAGTTGGCGTTTAAA
C [symbol] gttaaattgttttctataaacccttatacagtaac
atcttttttatttctaaaagtgttttggctggtctcacaattgtactttactttgtattatg
taaaaggaatacacaacgctgaagaaccctgatactaagggatatttgttcttacaggcaac
aatgcaggatttggaacagaggcgtccccagttggaagaactcattaccgctgcccaaaatt
tgaaaaacaagaccagcaatcaagaggctagaacaatcattacggatcgaagtaagtttttt
aacaagcatgggacacacaaagcaagatgcatgacaagtttcaataaaaacttaagttcata
tatccccctcacatttataaaaataatgtgaaataattgtaaatgataacaattgtgctgag
attttcagtccataatgttaccttttaataaatgaatgtaattccattgaatagaagaaata
C [symbol] GCTAGCTCGGAGAGACGACATCTAGAATTAAACTG
TCACTATCGATTACTAATTTTTTGCTCATAATAGAAGCAGCGATTAAAGGAATAGAATCAAC
AGTTCCAGTAACATCTCTTAGTGCATACATTTTTTTATCAGCAGGAACAATATCATCTGACT
GACCTGTGATGCTCATTCCAACTTCATTAATTGTTTTAATGAATTTTTCTTTAGATAATTCA
CTTGTTCAACCTTTACATGACTCTAATTTATCAATAGTACCACCAGTTACTCCAAGTCCTCT
ACCAGAAAGTTTACAAACCTTTACTCCATAACTTGCAACTAACGGACTATATACTAAACTTG
TTTTGTCTCCAACTCCGCCAGTTGAATGCTTATCAGCTTTTAAACCTGTAACCTCACTGACA
TCATAAACATATCCTGATTCAACATAAGATTGGGTTAATGCTAAAGTTTCTGCTTTGGTCAT
TCCATTAAAATAAACCGCCATAGCAAAAGCAGCCATTTGATAATCTGTTACATTATTTTTAA
CGTAACTGTTTATCAATCATTTAATTTCTTCAGCTGATAATTCTATTGAATGTTTCTTTTTT
TCTATAATTTCACTAAAACTGTAGTTCATAAGTCTCCTTTTGTAAGAGTGCACAATATTTAC
ACCATTACTCTTTCTACTATATTATAATAGAATAGACATATAAAAAACATAAGGAGTACAAA
TGGTTTTTGATAAAAATAACAAAGTTTATAGTGAATGAATAAATAGCCAAAAATTGGATGAT
GAGTTGAAAAGCCTTTTAGTAAATGCTACTGATGATGAATTGCATGCAGCATTTGAAGGAAT
AGAGTTAGAATTTGGAACAGCAGGTATAAGAGGTATTCTTGGAGCAGGACCTGGAAGATTTA
ACGTTTACACTGTTAAAAAAGTTACTATTGCATTTGCAGAATTATTAAAACAAAATTACCCA
AATAGGTTGAATGATGGAATAGTTGTTGGTCATGATAACCGTCATAATTCTAAACAGTTTGC
AAAAGTTGTAGCCGAAGTTTTATCAAGCTTGTGAAATAGCTGTTGAAGCTGGATTAGAATTT
GTTAAAACATCAACAGGATTTTCAAAATCAGGTGCAACATTTGAAGATGTTAAACTAATGAA
GTCAGTTGTTAAAGACAATGCTTTAGTTAAAGCAGCTGGTGGAGTTAGAACATTTGAAGATG
CTCAAAAAATGATTGAAGCAGGAGCTGACCGCTTAGGAACAAGTGGTGGAGTAGCTATTATT
AAAGGTGAAGAAAACAACGCGAGTTACTAAAACTAGCGTTTTTTTATTTTGCTCATTTTTAT
TAAAAGTTTGCAAAAAGGAACATAAAAATTCTAATTATTGATACTAAAGTTATTAAAAAGAA
GATTTTGGTTGATTTTATAAAGGTCATAGAATATAATATTTTAGCATGTGTATTTTGTGTGC
TCATTTACAACCGTCTCGCGGCCGCGGGGATCCAGACATGATAAGATACATTGATGAGTTTG
GACAAACCACAACTAGAATGCAGTGAAAAAAATGCTTTATTTGTGAAATTTGTGATGCTATT
GCTTTATTTGTAACCATTATAAGCTGCAATAAACAAGTTAACAACAACAATTGCATTCATTT
TATGTTTCAGGTTCAGGGGGAGGTGTGGGAGGTTTTTTAGTCGACCTCGAGCAGTGTGGTTT
TGCAAGAGGAAGCAAAAAGCCTCTCCACCCAGGCCTGGAATGTTTCCACCCAAGTCGAAGGC
AGTGTGGTTTTGCAAGAGGAAGCAAAAAGCCTCTCCACCCAGGCCTGGAATGTTTCCACCCA
ATGTCGAGCAACCCCGCCCAGCGTCTTGTCATTGGCGAATTCGAACACGCAGATGCAGTCGG
GGCGGCGCGGTCCCAGGTCCACTTCGCATATTAAGGTGACGCGTGTGGCCTCGAACACCGAG
CGACCCTGCAGCCAATATGGGATCGGCCATTGAACAAGATGGATTGCACGCAGGTTCTCCGG
CCGCTTGGGTGGAGAGGCTATTCGGCTATGACTGGGCACAACAGACAATCGGCTGCTCTGAT
GCCGCCGTGTTCCGGCTGTCAGCGCAGGGGCGCCCGGTTCTTTTTGTCAAGACCGACCTGTC
CGGTGCCCTGAATGAACTGCAGGACGAGGCAGCGCGGCTATCGTGGCTGGCCACGACGGGCG
TTCCTTGCGCAGCTGTGCTCGACGTTGTCACTGAAGCGGGAAGGGACTGGCTGCTATTGGGC
GAAGTGCCGGGGCAGGATCTCCTGTCATCTCACCTTGCTCCTGCCGAGAAAGTATCCATCAT
GGCTGATGCAATGCGGCGGCTGCATACGCTTGATCCGGCTACCTGCCCATTCGACCACCAAG
CGAAACATCGCATCGAGCGAGCACGTACTCGGATGGAAGCCGGTCTTGTCGATCAGGATGAT
CTGGACGAAGAGCATCAGGGGCTCGCGCCAGCCGAACTGTTCGCCAGGCTCAAGGCGCGCAT
GCCCGACGGCGAGGATCTCGTCGTGACCCATGGCGATGCCTGCTTGCCGAATATCATGGTGG
AAAATGGCCGCTTTTCTGGATTCATCGACTGTGGCCGGCTGGGTGTGGCGGACCGCTATCAG
GACATAGCGTTGGCTACCCGTGATATTGCTGAAGAGCTTGGCGGCGAATGGGCTGACCGCTT
CCTCGTGCTTTACGGTATCGCCGCTCCCGATTCGCAGCGCATCGCCTTCTATCGCCTTCTTG
ACGAGTTCTTCTGAGGGGATCCGTCGACTAGAGCTCGCTGATCAGCCTCGACTGTGCCTTCT
AGTTGCCAGCCATCTGTTGTTTGCCCCTCCCCCGTGCCTTCCTTGACCCTGGAAGGTGCCAC
TCCCACTGTCCTTTCCTAATAAAATGAGGAAATTGCATCGCATTGTCTGAGTAGGTGTCATT
CTATTCTGGGGGGTGGGGTGGGGCAGGACAGCAAGGGGGAGGATTGGGAAGACAATAGCAGG
CATGCTGGGGAGAGATCTAGGAACCCCTAGTGATGGAGTTGGCCACTCCCTCTCTGCGCGCT
CGCTCGCTCACTGAGGCCGCCCGGGCAAAGCCCGGGCGTCGGGCGACCTTTGGTCGCCCGGC
CTCAGTGAGCGAGCGAGCGCGCAGAGAGGGAGTGGCCAA
SEQ ID NO: 59
AAV expression cassette for version 2 exon52 donor sequence with gRNA7:
*Note: version 2 is referring to modified donor sequence for improved detection via deep
sequencing analysis (these modified nucleotides are provided in lowercase)
AAV ITR, U6 PROMOTER, [symbol] PAM (ATTCCT), SaCas9 gRNA
SCAFFOLD, donor sequence, exon52
TTGGCCACTCCCTCTCTGCGCGCTCGCTCGCTCACTGAGGCCGGGCGACCAAAGGTCGCCCG
ACGCCCGGGCTTTGCCCGGGCGGCCTCAGTGAGCGAGCGAGCGCGCAGAGAGGGAGTGGCCA
ACTCCATCACTAGGGGTTCCTCAGATCTGAATTCGGTACCTTCCTAGGGCCTATTTCCCATG
ATTCCTTCATATTTGCATATACGATACAAGGCTGTTAGAGAGATAATTGGAATTAATTTGAC
TGTAAACACAAAGATATTAGTACAAAATACGTGACGTAGAAAGTAATAATTTCTTGGGTAGT
TTGCAGTTTTAAAATTATGTTTTAAAATGGACTATCATATGCTTACCGTAACTTGAAAGTAT
TTCGATTTCTTGGCTTTATATATCTTGTGGAAAGGACGAAACACCG [symbol] [symbol]
GTTTTAGTACTCTGGAAACAGAATCTACTAAAACAAGGCAAAATGCCGTGTTTATCT
CGTCAACTTGTTGGCGAGATTTTTTTCTAGACCCAGCTTTCTTGTACAAAGTTGGCGTTTAA
AC [symbol] gttaatttgcgttctagccaccgagatacagta
acatcttttttatttctaaaagtgttttggctggtctcacaattgtactttactttgtatta
tgtaaaaggaatacacaacgctgaagaaccctgatactaagggatatttgttcttacaggca
acaatgcaggatttggaacagaggcgtccccagttggaagaactcattaccgctgcccaaaa
tttgaaaaacaagaccagcaatcaagaggctagaacaatcattacggatcgaagtaagtttt
ttaacaagcatgggacacacaaagcaagatgcatgacaagtttcaataaaaacttaagttca
tatatccccctcacatttataaaaataatgtgaaataattgtaaatgataacaattgtgctg
agattttcagtccataatgttaccttttaataaatgaatgtaattccattgaatagaagaaa
tac [symbol] GCTAGCTCGGAGAGACGACATCTAGAATTAAA
CTGTCACTATCGATTACTAATTTTTTGCTCATAATAGAAGCAGCGATTAAAGGAATAGAATC
AACAGTTCCAGTAACATCTCTTAGTGCATACATTTTTTTATCAGCAGGAACAATATCATCTG
ACTGACCTGTGATGCTCATTCCAACTTCATTAATTGTTTTAATGAATTTTTCTTTAGATAAT
TCACTTGTTCAACCTTTACATGACTCTAATTTATCAATAGTACCACCAGTTACTCCAAGTCC
TCTACCAGAAAGTTTACAAACCTTTACTCCATAACTTGCAACTAACGGACTATATACTAAAC
TTGTTTTGTCTCCAACTCCGCCAGTTGAATGCTTATCAGCTTTTAAACCTGTAACCTCACTG
ACATCATAAACATATCCTGATTCAACATAAGATTGGGTTAATGCTAAAGTTTCTGCTTTGGT
CATTCCATTAAAATAAACCGCCATAGCAAAAGCAGCCATTTGATAATCTGTTACATTATTTT
TAACGTAACTGTTTATCAATCATTTAATTTCTTCAGCTGATAATTCTATTGAATGTTTCTTT
TTTTCTATAATTTCACTAAAACTGTAGTTCATAAGTCTCCTTTTGTAAGAGTGCACAATATT
TACACCATTACTCTTTCTACTATATTATAATAGAATAGACATATAAAAAACATAAGGAGTAC
AAATGGTTTTTGATAAAAATAACAAAGTTTATAGTGAATGAATAAATAGCCAAAAATTGGAT
GATGAGTTGAAAAGCCTTTTAGTAAATGCTACTGATGATGAATTGCATGCAGCATTTGAAGG
AATAGAGTTAGAATTTGGAACAGCAGGTATAAGAGGTATTCTTGGAGCAGGACCTGGAAGAT
TTAACGTTTACACTGTTAAAAAAGTTACTATTGCATTTGCAGAATTATTAAAACAAAATTAC
CCAAATAGGTTGAATGATGGAATAGTTGTTGGTCATGATAACCGTCATAATTCTAAACAGTT
TGCAAAAGTTGTAGCCGAAGTTTTATCAAGCTTGTGAAATAGCTGTTGAAGCTGGATTAGAA
TTTGTTAAAACATCAACAGGATTTTCAAAATCAGGTGCAACATTTGAAGATGTTAAACTAAT
GAAGTCAGTTGTTAAAGACAATGOTTTAGTTAAAGCAGCTGGTGGAGTTAGAACATTTGAAG
ATGCTCAAAAAATGATTGAAGCAGGAGCTGACCGCTTAGGAACAAGTGGTGGAGTAGCTATT
ATTAAAGGTGAAGAAAACAACGCGAGTTACTAAAACTAGCGTTTTTTTATTTTGCTCATTTT
TATTAAAAGTTTGCAAAAAGGAACATAAAAATTCTAATTATTGATACTAAAGTTATTAAAAA
GAAGATTTTGGTTGATTTTATAAAGGTCATAGAATATAATATTTTAGCATGTGTATTTTGTG
TGCTCATTTACAACCGTCTCGCGGCCGCGGGGATCCAGACATGATAAGATACATTGATGAGT
TTGGACAAACCACAACTAGAATGCAGTGAAAAAAATGCTTTATTTGTGAAATTTGTGATGCT
ATTGCTTTATTTGTAACCATTATAAGCTGCAATAAACAAGITAACAACAACAATTGCATTCA
TTTTATGTTTCAGGTTCAGGGGGAGGTGTGGGAGGTTTTTTAGTCGACCTCGAGCAGTGTGG
TTTTGCAAGAGGAAGCAAAAAGCCTCTCCACCCAGGCCTGGAATGTTTCCACCCAAGTCGAA
GGCAGTGTGGTTTTGCAAGAGGAAGCAAAAAGCCTCTCCACCCAGGCCTGGAATGTTTCCAC
CCAATGTCGAGCAACCCCGCCCAGCGTCTTGTCATTGGCGAATTCGAACACGCAGATGCAGT
CGGGGCGGCGCGGTCCCAGGTCCACTTCGCATATTAAGGTGACGCGTGTGGCCTCGAACACC
GAGCGACCCTGCAGCCAATATGGGATCGGCCATTGAACAAGATGGATTGCACGCAGGTTCTC
CGGCCGCTTGGGTGGAGAGGCTATTCGGCTATGACTGGGCACAACAGACAATCGGCTGCTCT
GATGCCGCCGTGTTCCGGCTGTCAGCGCAGGGGCGCCCGGTTCTTTTTGTCAAGACCGACCT
GTCCGGTGCCCTGAATGAACTGCAGGACGAGGCAGCGCGGCTATCGTGGCTGGCCACGACGG
GCGTTCCTTGCGCAGCTGTGCTCGACGTTGTCACTGAAGCGGGAAGGGACTGGCTGCTATTG
GGCGAAGTGCCGGGGCAGGATCTCCTGTCATCTCACCTTGCTCCTGCCGAGAAAGTATCCAT
CATGGCTGATGCAATGCGGCGGCTGCATACGCTTGATCCGGCTACCTGCCCATTCGACCACC
AAGCGAAACATCGCATCGAGCGAGCACGTACTCGGATGGAAGCCGGTCTTGTCGATCAGGAT
GATCTGGACGAAGAGCATCAGGGGCTCGCGCCAGCCGAACTGTTCGCCAGGCTCAAGGCGCG
CATGCCCGACGGCGAGGATCTCGTCGTGACCCATGGCGATGCCTGCTTGCCGAATATCATGG
TGGAAAATGGCCGCTTTTCTGGATTCATCGACTGTGGCCGGCTGGGTGTGGCGGACCGCTAT
CAGGACATAGCGTTGGCTACCCGTGATATTGCTGAAGAGCTTGGCGGCGAATGGGCTGACCG
CTTCCTCGTGCTTTACGGTATCGCCGCTCCCGATTCGCAGCGCATCGCCTTCTATCGCCTTC
TTGACGAGTTCTTCTGAGGGGATCCGTCGACTAGAGCTCGCTGATCAGCCTCGACTGTGCCT
TCTAGTTGCCAGCCATCTGTTGTTTGCCCCTCCCCCGTGCCTTCCTTGACCCTGGAAGGTGC
CACTCCCACTGTCCTTTCCTAATAAAATGAGGAAATTGCATCGCATTGTCTGAGTAGGTGTC
ATTCTATTCTGGGGGGTGGGGTGGGGCAGGACAGCAAGGGGGAGGATTGGGAAGACAATAGC
AGGCATGCTGGGGAGAGATCTAGGAACCCCTAGTGATGGAGTTGGCCACTCCCTCTCTGCGC
GCTCGCTCGCTCACTGAGGCCGCCCGGGCAAAGCCCGGGCGTCGGGCGACCTTTGGTCGCCC
GGCCTCAGTGAGCGAGCGAGCGCGCAGAGAGGGAGTGGCCAA
SEQ ID NO: 60
AAV expression cassette for superexon (exon52-exon79) donor sequence with gRNA7:
*Note: version 2 is referring to modified donor sequence for improved detection via deep
sequencing analysis (these modified nucleotides are provided in lowercase)
AAV ITR, U6 PROMOTER, [symbol] PAM (AATCCT), SaCas9 gRNA
SCAFFOLD, donor sequence, exon52-79 cDNA sequence, [symbol]
TTGGCCACTCCCTCTCTGCGCGCTCGCTCGCTCACTGAGGCCGGGCGACCAAAGGTCGCCCG
ACGCCCGGGCTTTGCCCGGGCGGCCTCAGTGAGCGAGCGAGCGCGCAGAGAGGGAGTGGCCA
ACTCCATCACTAGGGGTTCCTCAGATCTGAATTCGGTACCTTCCTAGGGCCTATTTCCCATG
ATTCCTTCATATTTGCATATACGATACAAGGCTGTTAGAGAGATAATTGGAATTAATTTGAC
TGTAAACACAAAGATATTAGTACAAAATACGTGACGTAGAAAGTAATAATTTOTTGGGTAGT
TTGCAGTTTTAAAATTATGTTTTAAAATGGACTATCATATGCTTACCGTAACTTGAAAGTAT
TTCGATTTOTTGGCTTTATATATCTTGTGGAAAGGACGAAACACCG [symbol] [symbol]
GTTTTAGTACTCTGGAAACAGAATCTACTAAAACAAGGCAAAATGCCGTGTTTATCT
CGTCAACTTGTTGGCGAGATTTTTTTCTAGACCCAGCTTTCTTGTACAAAGTTGGCGTTTAA
AC [symbol] gttaatttgcgttctagccaccgagatacagta
acatcttttttatttctaaaagtgttttggctggtctcacaattgtactttactttgtatta
tgtaaaaggaatacacaacgctgaagaaccctgatactaagggatatttgttcttacaggca
acaatgcaggatttggaacagaggcgtccccagttggaagaactcattaccgctgcccaaaa
tttgaaaaacaagaccagcaatcaagaggctagaacaatcattacggatcgaattgaaagaa
ttcagaatcagtgggatgaagtacaagaacaccttcagaaccggaggcaacagttgaatgaa
atgttaaaggattcaacacaatggctggaagctaaggaagaagctgagcaggtcttaggaca
ggccagagccaagcttgagtcatggaaggagggtccctatacagtagatgcaatccaaaaga
aaatcacagaaaccaagcagttggccaaagacctccgccagtggcagacaaatgtagatgtg
gcaaatgacttggccctgaaacttctccgggattattctgcagatgataccagaaaagtcca
catgataacagagaatatcaatgcctcttggagaagcattcataaaagggtgagtgagcgag
aggctgctttggaagaaactcatagattactgcaacagttccccctggacctggaaaagttt
cttgcctggcttacagaagctgaaacaactgccaatgtcctacaggatgctacccgtaagga
aaggctcctagaagactccaagggagtaaaagagctgatgaaacaatggcaagacctccaag
gtgaaattgaagctcacacagatgtttatcacaacctggatgaaaacagccaaaaaatcctg
agatccctggaaggttccgatgatgcagtcctgttacaaagacgtttggataacatgaactt
caagtggagtgaacttcggaaaaagtctctcaacattaggtcccatttggaagccagttctg
accagtggaagcgtctgcacctttctctgcaggaacttctggtgtggctacagctgaaagat
gatgaattaagccggcaggcacctattggaggcgactttccagcagttcagaagcagaacga
tgtacatagggccttcaagagggaattgaaaactaaagaacctgtaatcatgagtactcttg
agactgtacgaatatttctgacagagcagcctttggaaggactagagaaactctaccaggag
cccagagagctgcctcctgaggagagagcccagaatgtcactcggcttctacgaaagcaggc
tgaggaggtcaatactgagtgggaaaaattgaacctgcactccgctgactggcagagaaaaa
tagatgagacccttgaaagactccaggaacttcaagaggccacggatgagctggacctcaag
ctgcgccaagctgaggtgatcaagggatcctggcagcccgtgggcgatctcctcattgactc
tctccaagatcacctcgagaaagtcaaggcacttcgaggagaaattgcgcctctgaaagaga
acgtgagccacgtcaatgaccttcctcgccagcttaccactttgggcattcagctctcaccg
tataacctcagcactctggaagacctgaacaccagatggaagcttctgcaggtggccgtcga
ggaccgagtcaggcagctgcatgaagcccacagggactttggtccagcatctcagcactttc
tttccacgtctgtccagggtccctgggagagagccatctcgccaaacaaagtgccctactat
atcaaccacgagactcaaacaacttgctgggaccatcccaaaatgacagagctctaccagtc
tttagctgacctgaataatgtcagattctcagcttataggactgccatgaaactccgaagac
tgcagaaggccctttgcttggatctcttgagcctgtcagctgcatgtgatgccttggaccag
cacaacctcaagcaaaatgaccagcccatggatatcctgcagattattaattgtttgaccac
tatttatgaccgcctggagcaagagcacaacaatttggtcaacgtccctctctgcgtggata
tgtgtctgaactggctgctgaatgtttatgatacgggacgaacagggaggatccgtgtcctg
tcttttaaaactggcatcatttccctgtgtaaagcacatttggaagacaagtacagatacct
tttcaagcaagtggcaagttcaacaggattttgtgaccagcgcaggctgggcctccttctgc
atgattctatccaaattccaagacagttcggtgaagttgcatcctttgggggcagtaacatt
gagccaagtgtccggagctgcttccaatttgctaataataagccagagatcgaagcggccct
cttcctagactcgatgagactggaaccccagtccatggtgtggctgcccgtcctgcacagag
tggctgctgcagaaactgccaagcatcaggccaaatgtaacatctgcaaagagtgtccaatc
attggattcaggtacaggagtctaaagcactttaattatgacatctgccaaagctgcttttt
ttctggtcgagttgcaaaaggccataaaatgcactatcccatggtggaatattgcactccga
ctacatcaggagaagatgttcgagactttgccaaggtactaaaaaacaaatttcgaaccaaa
aggtattttgcgaagcatccccgaatgggctacctgccagtgcagactgtcttagaggggga
caacatggaaactcccgttactctgatcaacttctggccagtagattctgcgcctgcctcgt
cccctcagctttcacacgatgatactcattcacgcattgaacattatgctagcaggctagca
gaaatggaaaacagcaatggatcttatctaaatgatagcatctctcctaatgagagcataga
tgatgaacatttgttaatccagcattactgccaaagtttgaaccaggactcccccctgagcc
agcctcgtagtcctgcccagatcttgatttccttagagagtgaggaaagaggggagctagag
agaatcctagcagatcttgaggaagaaaacaggaatctgcaagcagaatatgaccgtctaaa
gcagcagcacgaacataaaggcctgtccccactgccgtcccctcctgaaatgatgcccacct
ctccccagagtccccgggatgctgagctcattgctgaggccaagctactgcgtcaacacaaa
ggccgcctggaagccaggatgcaaatcctggaagaccacaataaacagctggagtcacagtt
acacaggctaaggcagctgctggagcaaccccaggcagaggccaaagtgaatggcacaacgg
tgtcctctccttctacctctctacagaggtccgacagcagtcagcctatgctgctccgagtg
gttggcagtcaaacttcggactccatgggtgaggaagatcttctcagtcctccccaggacac
aagcacagggttagaggaggtgatggagcaactcaacaactccttccctagttcaagaggaa
gaaatacccctggaaagccaatgagagaggacacaatg [symbol] tcagc
ctcga

[symbol]

[symbol]

[symbol]

[symbol]

[symbol]

[symbol]

[symbol]

gtaagttttttaacaagcatgggacacacaaagcaagatgcatgacaagtttcaataaa
aacttaagttcatatatccccctcacatttataaaaataatgtgaaataattgtaaatgata
acaattgtgctgagattttcagtccataatgttaccttttaataaatgaatgtaattccatt
gaatagaagaaatac [symbol] CGGCCGGAAGACAATAGCAG
GCATGCTGGGGAGAGATCTAGGAACCCCTAGTGATGGAGTTGGCCACTCCCTCTCTGCGCGC
TCGCTCGCTCACTGAGGCCGCCCGGGCAAAGCCCGGGCGTCGGGCGACCTTTGGTCGCCCGG
CCTCAGTGAGCGAGCGAGCGCGCAGAGAGGGAGTGGCCAA
SEQ ID NO: 61
SV40 NLS
Pro-Lys-Lys-Lys-Arg-Lys-Val
SEQ ID NO: 62
DNA sequence of the gRNA constant region
gtttaagagctatgctggaaacagcatagcaagtttaaataaggctagtccgttatcaactt
gaaaaagtggcaccgagteggtgc
SEQ ID NO: 63
RNA sequence of the gRNA constant region
guuuaagagcuaugcuggaaacagcauagcaaguuuaaauaagguaguccguuaucaacuu
gaaaaaguggcaccgagucggugc

| | Spacer Sequence | | |
|---|---|---|---|
| | (Sequence the gRNA targets | | |
| | and binds) | PAM | gRNA |
| gScb | GCACTACCAGAGCTAACTCA | NNGRRT | GCACUACCAGAGCUAACUCA |
| | (SEQ ID NO: 87) | (SEQ ID | (SEQ ID NO: 88) |
| | | NO: 9) | |
| g1 | CTTTACTTTGTATTATGTAAA | AGGAAT | CUUUACUUUGUAUUAUGUAAA |
| | (SEQ ID NO: 29) | (SEQ ID | (SEQ ID NO: 64) |
| | | NO: 89) | |
| g2 | TTTGAAATATTTTTGATATCT | AAGAAT | UUUGAAAUAUUUUUGAUAUCU |
| | (SEQ ID NO: 30) | (SEQ ID | (SEQ ID NO: 65) |
| | | NO: 90) | |
| g3 | TTTAAGTAATCCGAGGTACTC | CGGAAT | UUUAAGUAAUCCGAGGUACUC |
| | (SEQ ID NO: 31) | (SEQ ID | (SEQ ID NO: 66) |
| | | NO: 91) | |
| g4 | TTTAAATACATTGTCGTAATT | CAGAAT | UUUAAAUACAUUGUCGUAAUU |
| | (SEQ ID NO: 32) | (SEQ ID | (SEQ ID NO: 67) |
| | | NO: 92) | |
| g5 | TACCTTAATTTTGACGTCACA | CAGAAT | UACCUUAAUUUUGACGUCACA |
| | (SEQ ID NO: 33) | (SEQ ID | (SEQ ID NO: 68) |
| | | NO: 92) | |
| g6 | ATTTGACAGGTGAGAAATCTC | AGGGGT | AUUUGACAGGUGAGAAAUCUC |
| | (SEQ ID NO: 34) | (SEQ ID | (SEQ ID NO: 69) |
| | | NO: 93) | |
| g7 | TCATTTATAATACAGGGGAAT | AGGAAT | UCAUUUAUAAUACAGGGGAAU |
| | (SEQ ID NO: 35) | (SEQ ID | (SEQ ID NO: 70) |
| | | NO: 89) | |
| g8 | TTAAAGTCATTTATAATACAG | GGGAAT | UUAAAGUCAUUUAUAAUACAG |
| | (SEQ ID NO: 36) | (SEQ ID | (SEQ ID NO: 71) |
| | | NO: 94) | |
| g9 | AAATAGACACTGAAGAAAGGG | AAGAAT | AAAUAGACACUGAAGAAAGGG |
| | (SEQ ID NO: 37) | (SEQ ID | (SEQ ID NO: 72) |
| | | NO: 90) | |
| g10 | CCCCAATTAAAATAAAATTTA | CTGAGT | CCCCAAUUAAAAUAAAAUUUA |
| | (SEQ ID NO: 38) | (SEQ ID | (SEQ ID NO: 73) |
| | | NO: 95) | |
| g11 | TAAGTAATCCGAGGTACTO | CGGAAT | UAAGUAAUCCGAGGUACUC |
| (g3) | (SEQ ID NO: 39) | (SEQ ID | (SEQ ID NO: 74) |
| | | NO: 91) | |
| g12 | TTAAGTAATCCGAGGTACTC | CGGAAT | UUAAGUAAUCCGAGGUACUC |
| (g3) | (SEQ ID NO: 40) | (SEQ ID | (SEQ ID NO: 75) |
| | | NO: 91) | |
| g13 | GTTTAAGTAATCCGAGGTACT | CGGAAT | GUUUAAGUAAUCCGAGGUAC |
| (g3) | C | (SEQ ID | UC |
| | (SEQ ID NO: 41) | NO: 91) | (SEQ ID NO: 76) |
| g14 | GGTTTAAGTAATCCGAGGTAC | CGGAAT | GGUUUAAGUAAUCCGAGGUA |
| (g3) | TC | (SEQ ID | CUC |
| | (SEQ ID NO: 42) | NO: 91) | (SEQ ID NO: 77) |
| g15 | TTGACAGGTGAGAAATCTC | AGGGGT | UUGACAGGUGAGAAAUCUC |
| (g6) | (SEQ ID NO: 43) | (SEQ ID | (SEQ ID NO: 78) |
| | | NO: 93) | |
| g16 | TTTGACAGGTGAGAAATCTC | AGGGGT | UUUGACAGGUGAGAAAUCUC |
| (g6) | (SEQ ID NO: 44) | (SEQ ID | (SEQ ID NO: 79) |
| | | NO: 93) | |
| g17 | CATTTGACAGGTGAGAAATCT | AGGGGT | CAUUUGACAGGUGAGAAAUCU |
| (g6) | C | (SEQ ID | C |
| | (SEQ ID NO: 45) | NO: 93) | (SEQ ID NO: 80) |
| g18 | TCATTTGACAGGTGAGAAATC | AGGGGT | UCAUUUGACAGGUGAGAAAUC |
| (g6) | TC | (SEQ ID | UC |
| | (SEQ ID NO: 46) | NO: 93) | (SEQ ID NO: 81) |
| g19 | ATTTATAATACAGGGGAAT | AGGAAT | AUUUAUAAUACAGGGGAAU |
| (g7) | (SEQ ID NO: 47) | (SEQ ID | (SEQ ID NO: 82) |
| | | NO: 89) | |
| g20 | CATTTATAATACAGGGGAAT | AGGAAT | CAUUUAUAAUACAGGGGAAU |
| (g7) | (SEQ ID NO: 48) | (SEQ ID | (SEQ ID NO: 83) |
| | | NO: 89) | |
| g21 | GTCATTTATAATACAGGGGAA | AGGAAT | GUCAUUUAUAAUACAGGGGAA |
| (g7) | T | (SEQ ID | U |
| | (SEQ ID NO: 49) | NO: 89) | (SEQ ID NO: 84) |
| g22 | AGTCATTTATAATACAGGGGA | AGGAAT | AGUCAUUUAUAAUACAGGGGA |
| (g7) | AT | (SEQ ID | AU |
| | (SEQ ID NO: 50) | NO: 89) | (SEQ ID NO: 85) |
| g23 | GCACTACCAGAGOTAACTCA | | GCACUACCAGAGCUAACUCA |
| | (SEQ ID NO: 51) | | (SEQ ID NO: 86) |

SEQ ID NO: 96
gRNA targeting human intron 51
CTCTGATAACCCAGCTGTGTGTT
SEQ ID NO: 97
gRNA targeting human intron 52
CTAGACCATTTOCCACCAGTTCT

| Description | Forward Primer (5′-3′) |
|---|---|
| Surveyor | Fwd: CTGATGCTCTCCAAACTTGCC (SEQ ID NO: 98) |
| (g1, g5, g6) | Rev: TGCTTTGTGTGTCCCATGCT (SEQ ID NO: 99) |
| Surveyor | Fwd: ATACCTCTGAGATTGTGGTCCT (SEQ ID NO: 100) |
| (g2, g3, g4) | Rev: TGGGCAGCGGTAATGAGTTC (SEQ ID NO: 101) |
| Surveyor | Fwd: TTACTGAGTTTTAGAACCAGAGCTA (SEQ ID NO: 102) |
| (g7, g8) | Rev: AGGGTTCTTCAGCGTTGTGT (SEQ ID NO: 103) |
| Surveyor | Fwd: AGCAGGAGTCAAAGTACAGAGT (SEQ ID NO: 104) |
| (g9, g10) | Rev: TCCGGAGTACCTCGGATTAC (SEQ ID NO: 105) |
| gDNA integration | Fwd: TTACTGAGTTTTAGAACCAGAGCTA (SEQ ID NO: 106) |
| PCR | Rev: GAGTTCTTCCAACTGGGGAC (SEQ ID NO: 107) |
| CDNA integration | Fwd: CTGACCACTATTGGAGCCTCTC (SEQ ID NO: 108) |
| PCR | Rev: GAGTTCTTCCAACTGGGGAC (SEQ ID NO: 109) |
| 3′ RACE GSP | GTAGTCGTTTAAACCGCTGATCAGCCTCG (SEQ ID NO: 110) |
| ddPCR - Corrected | Fwd: GCTTTCTCTGCTTGATCAAG (SEQ ID NO: 111) |
| (Ex51-Ex52 junction) | Rev: GAGTTCTTCCAACTGGGGAC (SEQ ID NO: 112) |
| | Probe: GCAACAATGCAGGATTTG (SEQ ID NO: 113) |
| ddPCR - Unedited | Fwd: GCTTTCTCTGCTTGATCAAG (SEQ ID NO: 114) |
| (Ex51-Ex53 junction) | Rev: CGGTTCTGAAGGTGTTCTTGTA (SEQ ID NO: 115) |
| | Probe: AGCAGAAGTTGAAAG (SEQ ID NO: 116) |
| ddPCR | Fwd: GATGAGCTGGACCTCAAGCT (SEQ ID NO: 117) |
| Normalization | Rev: GTGGCTCACGTTCTCTTTCA (SEQ ID NO: 118) |
| (Ex59-Ex60 junction) | Probe: CGAGAAAGTCAAGGCACT (SEQ ID NO: 119) |
| Tn5-Top | CAAGCAGAAGACGGCATACGAGATNNNNNNNNNNGTCTCGTGGG |
| | CTCGGAGATGTGTATAAGAGACAG (SEQ ID NO: 120) |
| Tn5-Bottom | [Phos]CTGTCTCTTATACACATCT (SEQ ID NO: 121) |
| Tn5-GSP (g7) | AAGCAGTGGTATCAACGCAGAGTACCAGAGAAAATAGACACTGA |
| | AGAAAGGG (SEQ ID NO: 122) |
| Tn5-GSP (g12) | AAGCAGTGGTATCAACGCAGAGTACCOTTAATTTTGACGTCACAC |
| | AGAATG (SEQ ID NO: 123) |
| Tn5-Universal | CAAGCAGAAGACGGCATACGAGAT (SEQ ID NO: 124) |
| Tn5-BC, [i5 barcode] | AATGATACGGCGACCACCGAGATCTACAC[NNNNNNJCGGAAGCA |
| | GTGGTATCAACGCAGAGTAC (SEQ ID NO: 125) |
| Tn5-Read1 | CGGAAGCAGTGGTATCAACGCAGAGTAC (SEQ ID NO: 126) |
| (Miseq/Novaseq) | |
| Tn5-Index1 | GTACTCTGCGTTGATACCACTGCTTCCG (SEQ ID NO: 127) |
| (Novaseq) | |

SEQ ID NO: 128
Intron 51 of the human dystrophin gene
GTATGAGAAAAAATGATAAAAGTTGGCAGAAGTTTTTCTTTAAAATGAAGATTTTCCACCAATCACTT
TACTCTCCTAGACCATTTCCCACCAGTTCTTAGGCAACTGTTTCTCTCTCAGCAAACACATTACTCTC
ACTATTCAGCCTAAGTATAATCAAGGATATAAATTAATGCAAATAACAAAAGTAGCCATACATTAAAA
AGGAAATATACAAAAAAAAAAAAAAAAAAAGCAGAAACCTTACAAGAATAGTTGTCCTCAGTTAAATT
TACTAAACAACCTGGTATTTTAAAAATCTATTTTATACCAAATAAGTCACTCAACTGAGCTATTTACA
TTTAAACTGTTTGTTTTGGCACTACGCAGCCCAACATATTGCAGAATCAAATATAATAGTCTGGGAAT
TGATTATTATCCACTCTTCTAAGTTGTCTGTGCCAATTTGCCTTCTCCAATGATAAGGATAATTGAAA
GAGAGCTATAACTTAAAAAGAGAAAAGTAACAAAACATAAGATATTTAAAATTACCCTAGATCTTAAA
GTTGGCATTTATGCAATGCCATGTTCAAATGAACATGTTTTTAATACAAATAGTGCATTTTTCAGCCT
CAGTGTAATCCATTTGGTAAAATTATGACATCAACTAGAAACATTAGAATACATTGATGTAAATATGG
TTTACCTAGCTAGATCAAATATACTATATATCTTTTATATTTGTGAATGATTAAGAAAAATAATGTTG
GAATTGTTATACATTAAAGTTTTTTCACTTGTAACAGCTTTCAAGCCTTTCTAAAGAAATACAAAGTT
GTGCTGAAGGTATTTAGGTATTAAAGTACTACCTTTTGAAAAAACAAGAAGTGAGGCAGACAGAGTAA
GGGGAATTTCTTTGTAAAATAAACTTCACCAATTCCATAGGAATAAAAGTAATTTGATAGTAAACAAC
CTGCATTTAAAGGCCTTGAGCTTGAATACAGAAGACCTGAATTCAGTGCCATTTGCAAATGATGATTG
TGGTCAAGCCATCTCTGGATCTTCGTTTCCTATTCTGAGTACAGAGCATACAGAGTACACATTCACAT
TCACAATATAGTTATGGATATGGATGTATATAAATATATGTAAATACTACATATATGTACCTAAAATT
TGTTTTACTTCTGCTTTAAAAAAAGTAATTATAGCCACATTTTTCAGAAAAAGTAACTGAGGCTCATA
GATGTCAAATTCCCAGTAAGTAGCAGAACAAGGATTCAAATCCAAGTCCATTTGATTCCTAAGCTTGT
GTTATTACTTGCTACTGCAGAGAGTATACGTAGCAAGTAATATATGTACTGCAAGCAATACATACTAT
TGCTGCGGTAATAACTGTAACTGCAGTTACTATTTAGTGATTTGTATGTAGATGTAGATGTAGTCTAT
GTCAGACACTATGCTGAGCATTTTATGGTTGCTATGTACTGATACATACAGAAACAAGAGGTACGTTC
TTTTACAATACCATATTGAGTTATATAATACTCCCAGGACTTTTATTTACCAAAGGAAACAATATTTT
ATAATGTTTAAAGCCCAGGTTTTGAAGTTACATTGTCTGGGTTCAAAGCTTGGCTCCCAAGCTGTGTG
ACCTTGAGTAAGTTATTCTGCCTACCTGAGCCCAAGTTTATCTAGCTATAAAATGGGGATAGTTGTAC
TATCTGCCTTGCAGTTTGTCATCAGGATTAAGTTGGTTGGTACATGAAAAATGCTTCCCACTTTGCCT
TGCTTACTGCTTACTGCTAGTATTGAACAAATGTTAGTAATTATATTTGGTTCCACCACGAACTCTAG
AAATCTAACCAATGATGGCATTTGTATTATGCAAACTGTATATCACATCATAATATTATATGGAAATG
AGAGCTTGTTTCCGCTTCTGTAGCCTAGTCTACCATTGACATAGCTTCCTGCAGAAGTTACCAGATAA
TAGATTGGGAGAGAAAGTCCACACTTCCTTGTGACGGGTTTGTGAGTCCAGCATTTAGGGAAGCCATT
GATGTGCTCAGTAGTCTCCAGAGTTCTCTAAATAAATGTGTCCTTTTCAGAAAGGACTACTGATTTGA
TGCCCCCTCACAGAGATCGTCTTTAAATATAGGTCAAAAACTAATGTAGAGGGCCAGGTGCAATGTTT
CACGCCTGCACTCCCAGCGCTTTGGGAGGCTGAGGCAGGTGGATCACTTGAGGTCAGGAGTTTGAGAC
CAGCCTGGTCAACATGGCCAAACCCCATCTCTACTGAAAATAAAAAAATTAGCTGGTGTGGTGGCCCA
TGCCTATAATCCCAGCTACTAGGGAGGCTGAGGCAGGAGAATCACTTGAATCCTGGACCAGAGGTTCC
ATTGAGCTGAGATCACACCATTGCACTCCAGACTGAGTGACAGAGTGAGACTCCATCTCAGAAAAAAA
AAAATTTAGGGGGAAAAATCAAAAGCCATTTCTGAGACACAAAAATACAGGATTTATAAATTATATAT
GGTATATATAAAAATATTTTTAAAATAGTATATATAGCATATTATATATAATGATATGTAATGTTCAT
ATATTACATATTTATAAAAAAATCTAATCTCCCTTCTCTTGCTTGCTGAATAGGGGGATGCTTTGCCT
GCCTCTTCCTCTTATATTAAAAAATAATTCTTAAAGACATTGTCAGTTCTTGGCTTTTATAGCCTCAA
TCACCAAATTGTCGGTAAAATGGCCCTAAATAATCATTAAACAAATGTGTGTGAGAGGGGAAATAAGA
AGGATAAGTAAGTATGGGGAGGATTTTGTTATAATTTCAGGAAATCAATATCAATTTTATGTAAAGTT
TTAAATAAAGCAATCCCAACTTTAATGTTTGATGTGTGAAAAATTAGGCAAAATTCCAAAAGGGCTTT
ATAAACTGAAAAAAACTTTACTAACACCTATCCATTTTTATTATTTTAACCAACTTCTATTGAGCTGC
CACTAAGTACCTGGGAAACATAAAGTTGTACAACATAGAATGTGCAGGTAAAAGAGGTTGAAGGAAGA
AAATAATAACACTATGATAGAGATAAATTTTAGGATAATAGCTAACACATATGATATGCCAGTCATTG
ATCTAAGTACTTCACGTGAATTCTTTAATGCTTACAACATTACTGTGAGGTAGATAGAGAGGCACAGT
AAGGATAATAACCTGCCTGAGATCGAGGAAGAAAGACAATGATGAGATGTGAACTCAGGCAGTTTGGT
TCCAGAGTCCTCTCCCTTAAACCTCATAGTTTTCAACTTCTCTGATATTGTGTGGGTGATGCTGTTGG
GGCTTTCTTCAGGGAAAACTAAGCCAGGAGAGAGAATGGATGCTAGTGAGATATTCCTGAAGAAGGAA
AAACTTAAGCCAGGCATTAAAGAATGAGTTGGAATTACCTAGCTAGATAAAACGAGAAGGGCAATCCA
GGCAGAGGGAACAGACTGTGCTTTTCACTGAGGTGGAAAAAAAACAGAGTATATCAGAGGAATTGTGA
TTCCATATGGCTGAAGTTAAGGGTATATGATGAGGAAGAAATTGATGAGGTTGAATAGAGAGGACTGG
GGCTAAATAATGGGAATCCTTTGTTGCCAGACTGAGGAATTTTGATGATGGCCTACAGGCAGTGGCAA
CTCTGAAAGGATTGTAAACAGGAAAATAAAATCATCACATATAGTTTAGTTGCCTATCAATTAGAGCT
CTCTGGATGCAAGCAACAGAAATCATTCTCTGATTAAATCAGGCAGAAAGTAAATGTGCTGTAATTAG
CACAAAGGCATTGGAACAAAACTTACAAAAGGAAAAAGAATCTGAGCATGCCTTTCTGGGCATGTGGC
TAGCAAGAAGTATTCCAGTCTGTTTGTGATACTCTCTTTTCTCCATCCTGTGTGTAACTCTGTTCAAA
TTTTAAAGTCTTAAAAGAGAGTCCAGTTCACCTTGTTTGGGTCACATGTTAATACATGAGCTAGAAGG
GAGCAGAAAACTTTGATTTAAATCCCTCTCCTCCCAAAGTCTCAAAATTAGGGAAAGGCAATTCTCCT
GAATAGAAACTGGGTTCTATTGACAATAGAAGAAGGAAATGATTCTGACCAACCACTAAACAATAATT
GTCCACTGAACTCAGTCAAGAACATGTAGAATAAGTTGGAGGATAGAGCAAATAAAGGAGATTTGTAG
GAGGTAATTATTATGATCTAAAGCAAGCTTGTTCAACTCATGGCCTGTGAGCCACATGCGTCCCAGGA
TGGCTTTGAATGTGGCCCAACACAAATTTGTAAACTTTCTTAAAACATGAGATACTTTTTGTGACTTT
TTTTTGCTCATCAGCTATCATTAGTGTTAGTGTATTTTATGTGTGGCCCAGGACAATTCTTCTTCCAG
TGTGGCCCAGGGAAGCCAAAAGATTGGATACAGCTGATCTAAAGCAACAGGTTCATCTACTCAACTTC
ACAACGTGTAGACCTGAAATAAAGACCATTCATATACCAATACCYGAAATATAAATTTGTTTGACCAT
GACACGTACAGTAATTGGTTCTCAATAAATGTGGATAGCTTGATGGATAATGTGAATGCAATGTGATA
AGGAAACTTCATATTCAACAAAGACTGGAATGTGAGGATTATAATTCCAAAGCACCAGAAGATAGATA
AGATAATGCAATGAGACATTTTATGACTCAAGGCAAAGTTAGTTATGAGATTCAGACCAAACCTTAGA
CGTGCAGTAATTGAAATATTTGCCACAGAAGGGGTATAAGGACATGACATTCAAGTAAGCTAACCTTT
CACTAGCTTTAGACTTTGAACTCAGAAAACATATTTGGTGAAAAGCTTATGGTCCCCTTTAGTATGTA
TTGCTTGATTAAAGTATTATTTTAGAAAATGGTGAGCTGCTTCCATTTTGAAATAAAAATAATTTTTA
CTAAGTGAATTATATTCAGTGAAAAAAATGGAAGCTACAATTACAACTTTAATTTTTTTAAGTTTTAA
GAATACAGCCATTTAAAAAAATTAAGCAAATCTGCTTCATTTTAGACAGTAGAAAATATACCATTATC
TTTTAGAAGAATAGAGATGTGAAATATGCAAATTAAGCCTTTAGAAGTAAAGCACACATGAAGTTCAA
AGTTTAATTTCTAGAATTGTGAATCAATAGCAGTGGATGATTTGTACTTTATAGCTTAGTGTCGGAGA
AATCTGATTAAAAAATGCTTTTTCTGTTTCATCACATAAACATAAGTAAAATTGCTCTGAAACAACAA
TATTTGACAAGAATTAGCAGTTTTCTTTTTTGACATAATCTATCAAATGAAGGGAAAAATATGTCCTG
GGTTTTGCTTTGAGAGTGATTACTAAATCTGACCCTTAAGGAAAGGAAGGAGAGAACAAAGAAGGGAG
GAAAGAAAGGGAAGGAAGGAGGAGGAAAGGGAAAAAAAGAAGGAAGAGAGGAAGGAAAGCAGGAAAAA
GGGGAAGGAGAGAGAAAAGACAAAAGAAAGGTAGCAAGGAAAGAAAAAAAGACAAGAAAGGAATATTA
AAGAGGACAAAAGAGGAGTGAGGAAAGGAGGAAATGGAAGAGGGATGGTGGGAGACAGGAGGGAGAAA
GGTGGAGGGGGAAATATGAAGAGAGGTTCCCAGCAGTGGAGACTAGTGTTGCTATCAACAAATAGAAT
TTAGATGGCCATATGATATTATTTTTCATAATACTGGTGTCTGATTGCCTGTGCTGAGTTAATTGTAG
TCTTTTTTTTCAATTCCGTTTGGCCAGGTGTTCAGGATAATTCACCACAAAATCTCAACCACTGCACT
TGTATTGAATAAAGAATTGAGTTGGCAAAGGCATTTTATCCTCCAGTAAGACCTTTCCAGATTGGGGT
TGAGACAAATTGGCCAATCTGGACAAGATGATAATAGCATTGTTCAAGATTAATTTTTAACCACACAT
TGCACTGTTACCTGGGAGATTTCATTATCTAAAAATTGAATGAGCAGTTTTAGTGGGTATAGTGTATA
TTTAAATGGGACATAATTACTTGAATGAGTTTAATTTTTGTTGTTGTTGTTAAGGTCAAAGTACTTAA
AAATTATGATTTTTTAAAACTCTGTCTATACACAAAAAGCATTTGAATTAGCTACAGAATAATTCTGA
TTATAACTTTTGGTGAATAGATTCAGTCAAAATCTGATTACTAAACAACTTGTGTAGTATAGCCCTGG
AAGAATTGATGGGACAATGTGTGGGTAAAGTGGCATTGGCTATTTAAACTAAAAGCAATACAAAACAG
AATGTTTCTTGGTTTTATTCTGTTGTCACAAACCCAGCAGAAAGTGGCTATTACAATAGTTTCCCTTA
TTCAACAAATGAGAGAAGTTATAGACAATTTAGTTAATTGATCTAAAGTCACTTAGTAAATGTAATTG
TCCTAACATAAACCCAGACCCCCAGACCTCTTGGGAATAGATAATGTTTCTTACTTCTTTTCTATTTC
CTCAGCCACCCCCCTCAACTTCTTACACATCTCATTTCTCCATCCAAATTATAACAAAACAAAGCAAA
CATGGTTTATTTCCATGGGCATCAAATGGATTTCACGAGGTTGGGTGACAGTCATCTTAGGGTGAGGA
GATTGATTATTCTGTTTTTCTCTTTCATCGATCAACAATCCAGCCCTTCTCATCTCATCATTTCATTT
CTGCACAAACTTGTTTAAGAAATACCAATTAAGAAATTAATTAAGAAATTAATGTTGTAATCTGTTTG
GCTGAAGATATTTACAAATTTTGTGCTTTAATTATCTTCCAACAAATGTACATGTCTCTGGTAGACAG
CTTGCGACCATCTGGATGACTGATCCATATTTATATAATTTTCTTTCTTTACCTAATGAGACCAAATC
CACTATTATCTTCAACGAAGGATGTAAAGATATGTCAGTGTCAGTAATGTGACTTATTTTATATTCTC
TGGTCATAACAAAAATAAACCGCCCCTTAAATAAAAAGGTCATAGAGTTGCAAACACACACACACACA
CACACACACACACAAAATCATATTTTCTAAGTCTCCTAATTACCTTTTTATGGAAAATGATACCATAT
GCTTTTTTCTTAAAGAAACTACATAAACTTATAAACTATACTAAACTACACATTTCAAAGTCTATGAA
TGGAAATGTGTATCTTATTATATTTTAATTCAATTCACTGTAAACTTTTCTGTCAAAATCTTATCAAG
CAAAACTGATCCAGGATATTTACATGAATTCTGATGGAAGTCACTGTACTGTGTTTTCCATAAAATAC
CAGTGGGATTCTGATAAGGAAGTTTATGTTTGCCATTGTGTTTAAATAGAGAATTCTGGGCCGGGCAT
GGTAGCTCACGCCTGTAATCCCAGCACTTTGGGAGGCTGAGGCGGGTGTATCACCTGAGGTCAGGAGT
TTGAGACCAGCCTGACCAACATGGAGAAACCCCGTCTCTACTAAAAATACAAAATTAGCCGGGCGTGG
TGGCGCATGCCTGTAGCCCCAGCTACTCCTGAGGCTGAGGCAGGAGAATCGCTTGAACCCGGGAGGCA
GATGTTGCAGTGAGCCGAGATCACACCATTGCACTCCAGCCTGGGCAACAAGAGCGAAACTCCGTCTC
AAATAAATAAATAATTAGAGAATTCTATTTACAAATTTCCTTTCTTGGATCTAGTTAGGGCTCCTTTA
TATGGAGTGATTTTTATTGTTTTCATAGAAATACGTAGAATCTGGGTCTTCTCTAACTTTCTTACAGG
AAAGCAATGTAATAAGGTTTTTTTTTAATTTTCTGAAAGTTATATAATGTTATTGTTCCCTAAAGTTT
AGGACCTGCCTTTTAGGCTTTCCATTTCACCATAACTTTTGGTCCTTAAAGTCTGTAATTGAAGTTAC
AGTGTGTTATGATGTAAATTTTTCTTATTATTACCTTTAATGTTAGGGTAATGTTAACTAATGTTAAT
GTTAGGTATATGGTTGTTTTTTTCATTCCTTCGTTCAACAAATTGTCTTTGAAACCCATGTTACAAAG
CACTCTAGAGTCAGGTTGAAGACTATTAAGAAAGGAGAATAGAAAGAGACACTAGAGTAATAATTTGG
ATTTAAATTTGATTTCCTTGTGTATGATAGTGAATAAGTGTGAATAAGATGAGGCAGTGATCACACAT
CACTATTAGTAAAAGTGTTTCTGTACCTGTATCCACACTTTTATGTATATGGTTACTTATGTTAAAGT
GATACATATTATATAAAATTAACGTATACATTAAGTAGATATTTTAATAGTCTGTAATTAAATACTAC
TAGTATTTTCTTTCCTCCTTCAAGTGCTTACTTTTGATACCTCGAGTTACAGTGTCATAAAGATTCTT
TAGAAATATATTGACTGTCTTTTAAGAGCTTTTGATACAATACTGAGTTTACATTCATCTGTTATTTA
TTGAACACTTGCTGGTGAAAGGCATCAGTGTTATCTGCTCTTAGGGAACAAAAATTAAAAAGGGATAG
GCCCTAATTTTAGAGTGTATCCTCTATAAGAAAAACATAAAAGATAGGGCAGTCATGGCCACAAAAGA
AAAAAGTGTTATGGTGGTTTCAATCATATATGTATTAGAATGAATAAATCAACTGATCAATTGTGATT
TCTTATTCTAAATATGTGCCTGCCTTTTTCATATAGATGAAAATTAAGCTATGTTTATCTTTCCAGGG
ATCTTGTTGATTTTTATTCAATAACTTGGGAGTGAAAGTTGATTTTTGCATATGTTTTAATGTTTTTA
AATTTCATAAATGAATTGATCAGTAATTTCCAAGGTAGTAATGGCTGCATTGTTTTTGAAAAAAAAAA
AGCAACAGGATTTGA7TGTGCTTTTATGATTTTTAAAGAATTCATTAAAAATAATGCCACGGTTTCTA
AAATGATTTGAGTCAATTTCTTATTCGATTTATAAAAATAACTTTGAATACAATTTTAGTAATTCACA
AATGCTTTCAGTTCCCTTACCTTTATATTTTATATTCTGTGTAAACAAGTGACATAATATTTAAGAAT
TATATATCTCCTATGATTTATTCAAGAAAAGAATATATACTGTATTATTTATTTCAAGAACAGAAATG
CTTTGATTTAACTGTCATCTTCTCTCTTCAATTATGGAAGCAAAATAAACTGTAATGACCAATGTAAC
CCCTCCCCCATATCAAGTTAATCTATGTTCAACTCCAGAATTATTTTTGAACACTCAAACTAGAAATT
AAAAAAAATTAAATCCATGAAGACGATTTTTGCCAAAAGCATATAGATAAATTGAGTTGATTCTATAC
TTAAGAAAGTGGAGAGGAGAGAGTAATTTGGAGAGAGTAATTTACTCTTAATCCCATATTTTTTCCCT
AAATGTGAAAGAAGTAGATTGTAGTGAGAGGGAAAATAACCTGTAGCAACTTCATTGAGGCTAAGCTT
TCTGTCATGTTATATTATACGAAAGTAATGAAATGCTTCCACAGATAGAATCAGAAGTCCCCTCTGAG
AAATTCTACATAAAAATTAGCCTGCCACTTTACCACACTTACTCAAGTTTGATTTTTTTAAGTTATGT
AATAGATGTTAGGCACTAGAAGAGGACATTTACTGGGGGCAAAGATCAGTAGTTGGAAAGAATGCAAG
CAGGCAAGAAGCTATATATAATGAGATTTTACAGTACAATTGTTTTCTAAATGAAAATGAGGACGGGT
CCAGACACAATGGCTCACACTTGTAATATCAGTGCCAGGATGGAGGATCCCTTGAGGCCAGAAGTTCA
AGAGCAACCTGGGCAACAGAGTGAGACTTCATCTCTACAAAAAAATGAAATAAAAAGTTAGCTGGCTG
TGATGGTGTGGGCTTGTAGCCTTAGCTACTCAGGAGGCTGAGGTGACATGATCTCTTGGGCCCAGGAG
TTCGAGGCTGCAGTGAGCTATGATAGCGCCACTGGATTCCAACCTGGGCAATGGAACAAAACTCCATT
TCTAAAAAAGAATAAAATATAAAACTAAAATAATAAATAAATAAAAATGAGGATATATTTTATTTTAA
CATTTGGAAACTTTGTAGGTGAGGACCATGCAAACATTCAAGGTGTGAGTTCTGACCAAATCCAATTA
TTAACCATACCAATGACTTAAGGTTTCTTCACACTCCTTAAAGTTGATTAATATAATGATTATATAGT
TGACTGGTATGTCACAGCTTGAAGCCTTTGAGATTTATTCCTGCCTTTTCTGTAAAGGTTGTTTTGTT
AATTCCAGTATGTACTGGTCGTTTTTGTTTTGTTTTGTTTTTGTTTTTGTTTTGTTTTTTTGAGATGG
AGTCTCGCACTGTTGCCCGGGCTGGAGTGCAGTGGCACGATCTCGGCTCACTGCAACCTCCGCCACCT
AGGTTCAAGCGATTCTCCTGCTTCAGCCTCCTGAGTAGCTGGGATTACAGGCACTCACCACCACACCC
GGCTAATTTTTTTTATTTTTAGTAGAGATGGGGTTTCACTATGGTGGCCAGGCTGGTCTCAAATACCT
GACCTCATGATCCACCTGCCTTGGCCTCCCAAAGTGCGGGGATTACAGGCGTGAGCCACCGTGCCCGG
CTGCCAATATGTATTGGTCTTTTTCATCAATGATTCAGTCCAAAATCATTTTGTCCTTTAACTATATA
TTTTCTTGTAAAGCTGCTTCTGTTGTCTTGAACTTTTCTTTTCAAATGTATGTTGTCATTTGACTTTT
TAGATTGTTATTTTCTGGTCCTCGAAATAAATTTAAATTTCCTGTAAAGGAAGGTGTAATATTCTATT
TGACATAGCCGCTAAAGATGTACTAGGTGCTTTATAAATATTGTTGATTTACTTTATCTTCACAGATT
ACTAGTTTTACTTAGTATTTGGAATATGACAACATTTTATAGAGCTATATTCATATATATGTTTATCT
TAACTGTTAAATGCAATATGATTCATGTCTTGTTTTGGTCAATGATGAATGAAAGTCTCCTGAGAATT
AAATTTACTGCATCGATGCAAAAACAATCATAATTTTAGACACTCTAAGAATTTTAGAAATTAAAGGA
TTTTTTTTTTCCAGTTTACTCTGTTAAGATTGTGTTTAGCTATGCGTGACAGCATTCTCACTACAGTG
GCTTATCCAGATAGTTTCTTTTTCTCATAGAGCAAGACTTCCAGAATTATGTGTTCCAGGGTCAGTGC
AGCACCTCCAAAACCGTATGTCCCAACTTTTTCCTCCAACCCCAGTCATCTCCAACATGAGACTTTCT
TTTTGTTTTGTTTTGTTGTTTTTGTTTTTGTTTTTGTTTTGAGATGGAGTCTCTGTCGCCAGGCTGGA
GTGCAGTGGCGCGATCTCGACTCACTGCAACCTCTGACTCCCTGGTTCAAGGGATTCTCCTGCCTCAG
CCTCCTGAGTAGCTGGGATTACGGGAACGCACCACCACGCCCAGCTAATTTTTGTATTTTTAGTAGAG
ACGGGGTTTCACCATGTTGGCCAGGATGGTCTCGATCTCCTGACCTCATGATCTGCCTGCCTCAGCCT
CCCAAAGTGGTGGGATTACAGGCGTGAGCCACCGTGCCCAGCAAGACTTTTTTTCCTGTGGTCTCAAC
ATGGCTACTCTGCCTCCAGGCACTATGTCTGTACTTTAAAATGGAAGAAGGGAAAATGGGGAAAGTAA
AAGCATATTCCAGCTGTGTCAGCTCCTGTTTGTAAGGAAAACCAGTGCTTTTCTGGCAGCCCCACACA
GAAGAGTTTCTACTTGAACAGTGCATTAACCAGAAATGTGTCACGTGACCATTCCTAACTTCTAAGGA
TCTTGGGAGGATTGAGTGTTTTAACTGAATAGGTGTGTTTCTTTCTTCATAATTCAAAATGTGAAAAT
TGGTAACTTAGTTATAAAACCTTGCTAGTCTGAACAGAATTTGGATTTTTTTAGCTAAGAAGGAAAGA
AAGGGTATCGGATAGGCAGCTGGCTATGCTAGCCAAGATACTCTTAATAATGCACATTTTTCTTCTTT
GGACATAAGCAGTTTTAACTTAGCTAAATATGATGTGATTGTTTTCCTGTCTTCTTAGTTCTGTTTAA
ATTTGTTTCAGAAATCAAGGAAATAAAATGGAGAAAAAACTCTATTATTCATGTCTATCTTTCTGCCT
CTGAATATTTTTATGTTGGAGAAAGAGAAAGCAGTAACTTTCATAATAGCTTACATAGTCTGACAAAT
TCTAAACATGTCCGTTAGCATCAATATACGTGGTATTAGGTCATCAGTTTTTATATTCTGAATTATTA
AGACCCAAATAAACCCACTGAGTTCAAGAGAAAGTATACACTGAGCAATAAAAACATTACCAGTTCTA
GCAATGATAATCAAACAAGAAAACAAGTAATATAGTCTGTTTAGAATAACATGTTTTAAAGATCAAGT
TTTTCTTCCTTACCAATGTTGCCTTTCTTGTAACACTTTTTTTTCCTTCTTGAGATAGGCTTTCCTAT
CTTTTGTCACAAACCCCAATATTTACATGGCCATTCGTAGTCTATTCATAGCAGCACCACCCCATGGC
CCAAACTTGTAGATATTGCCCTCCTTCTATGGTTGTTCTAATAAGAATAACCACTCTTGTCTCTCATA
ATCTCAGCTGTTTTGTGCCGTTAAAATGGAAAATAATGAGTATTAAGATACTAACTAGGGGCCAGGCG
CGGTGGCTCACGCCTGTAATCCCAGCACTTTGGGAGGATGAGGCGGGCGGATCACGAGGTCAGAAGAT
TGAGACCATCCTGGCTAACACGGTGAAACCACGTCTCTACTAAAAATACAAAAAATTAGCCAGGCGTG
GTGGTGGGTGCCTGTGGTCCCAGCTACTCGGGAGGCTACTGCACTCCAGCCTGGGCGACAGAGCAAGA
CTCCATCTCAAAAAAAAAAAAAAAAAAAATACTAACTAGGTTTCAGTCATATGAGATGAATAAGTCCT
ACAAATCTGTACAGCCTAGGGCTTGTAGTTAACAATGTTTTATATTTAAAACTTTGCTAAGAGAGTAA
ATCTTTTTTTACCTGTTATTATCGTACATGCAAAAATAATAGTAAATAAGGAAGGTAAGAGAAAAATT
TTGGAGGTGATGCATAGGTTTATGGCATAGATTCTGGACATGATTTCACAGGGGTATACAGTCATGCA
TTGCTCAACAACAGATATACATTCGGAGAAATGCATGGTTAGCTGATTGATCTTGTTGTGCAAACATC
ATACAGTGTACTTACACAAACCTAGATGGTACATCCTACTATACATCTAGGTTGTATGGTATAGCCTA
TTGCTCCTAGGCTATAAACCAGTACAGCATGTGACTGTACTGAATACTTCAGGCAATTGGAACACGAT
GGCAAGTATTTGTGTATCTAATCACATCTAAACATAGAAAAGTTACAGAAAAATATTATAATCTTATA
GGACCACTGTCCTACATGTATACAGACTGTGCACATGATAGTGGTCCATTGATCAAAATGTCCTTATG
CAGCACATAACTGTAATTATCTCGAAACTCATCAAGCTGTGTTCATTAAATGTGTATAGCTTTTTATG
TCAATAAAGTGGTTAAGAAATCAATAAAGTGGTTAAAAAATATTTTGACTAGGAAATATACTATCATT
TCTAGTTGATAAAAGATCTCAACATTTCCAAAATTGTCCTACAGAAAACCAGGTTCATCAGGTGTTCA
TACATGATCCTCATGAAAAGGTCAAATAAGCTGAAAAACATGCATAGACGTTGCCTATCCTAGCAATC
TATGATGTACATCTCCATAGTAAGGTCACTGAAAAGTCTTTTAGGAATGTTAGTATTGTTAGCTCAGT
ATTTCTCAGTGATTTCTCCATGGAAACCATTTGTGTAGAGCATCTTGAGGAGCACAGCTGAGAGAACA
TTATCTTAGTTGGATGTGTATGTCCCTCTGAGTCACTTGATTTCTCTACATATGCTTTTACCAAATTA
ATCTTTTAGAAATCTT7TCTCTTCGCACTATGTCTATAATTTGTGAAGTTGTTACCAGGATAACATTT
GTGCCTCTCACCATGATGTACCTACCAGGGTCCAAGCAGCCATTCCTTCTCTAGAGCAACTGTCTGAG
GGAAAGAATTTAACACAGCATTCTACGAAATCATTTTATTTATAAAAATAGATTACTGCTTTACATAT
AGTAATTTATATTTAGAATATTGATTAATTATTAAAATCTGCATGAGAGCTTTAAAGAGTAGTACATA
ATATATAGCAGTTTGTACTCAAACTGTCTTCTAAAAAGGATTCACTTTTTGTTTGTATTCTATTGTCC
TATTCGTTGATAGTGTTACGTAAGTAATTATAAAACTTAAAATCTGGAAAGAGAATGTGGACTCAGAA
TGCCATCTCTTTTGTTATTTCAAATGGATTAGAAATGAACATACATATTCATTTTCTTTCATTACACA
TCCAGAGAAATAGAATGGATTTTATAAATATGTAAAAGCAAGGATTTTGATCACTGATAAAAAGGGAA
GGTTTGGTCACTACCTTATTTCATTCCTTTTTTCTTATCCTTTTTTTTTTTTTTGTCAATTATTTGAT
GACATCTCTGAACATCACCTTTTATTCATGACAAGAATTGGGTATCATGGTAAAGAACACTGTTAATA
TAATTCAGTTACTTCACCCCCTCCTGAAATATAGAGAAGCTTTAAGACTATGTGAATATTTTTTTCTG
GTTTTCTTGTATTTGTAGAAATAGCATGAGCTTTGTTTAAAGTCAGGCATCTAAAACCTTGCCCTGTA
TGTTATTGACAACCTGCACAAATTTTAGGATCTATTCTATTACAGTTTGTTCAACTGTAAAACTAGGA
TAGCAAACTCTATGTCATATTTTCGTTATCAGAATTTAAAAAGCATGTTTTAAGATCTTAGTAAATAA
TAAATCTCTACTCTGTAGTTGAATTTGTTCTATATTCTTTAAGAAATTCCCTTTGATGGTTATGCCAA
CCTCTGTATTACTTTTCTTCACACTTTAACTTTGCGCTGAAATCATAGTAGTATTTTACGTTATCAGT
CAAAATAACAGTCATCCTTAAAACAAATATGAATTTTAGATGATTAAATAGATTTGTATGGAGGTTCT
TCTTGCTAATCATAGCAGTTATCCTTGGTGAAAAATGATAGACACTTGAAAAAACCAATTAATCATGA
TGGCTATTTTTGCATCATAAATAAAGCTTTCAAATTTGAGAGGGAATCAAAAGGGCAATGGTAGTATA
GTGTCTCAAAGCCCCTTTCCAATTGATGGTACAAATTTAAAAAGAGAGAGAGAGAGAGAAACATGTTT
CACTGTAATTGTTTTCTAAGAGCTTCCAAAAAAGCGTATTTTCTTAATAGATTCAAATTTTTCAGTTG
GATTGAAAGGGAAGTCTTGGAGTGTAGTGAGGAGGGCACCTTCTGTTGAGAGGTGTTCAGACGACAGA
GTGTGCCCAAGGCCAAAGATGAGATGGTTTTGCGAAAGTCAGTGGCCACAAACAGGTGTGTTTGACCC
CTGAGAGATATGCAGGAAGTCTACCCCACTTTAATTCTTCCAAATATTCTTTACCTTAATTCCCAAGT
ACTTGATAAAGGAGCAATGGGGAGAAAATATGCACACTATTATGGAAAAGTTTTGACCTACACTTTGG
AGAGTTTTAGATTAAGAGCATTCTAGAAATCAGTCCCAAATGCCTAGGGTTTACTTACTTAAAGATAA
TATCATAGTTTGGGTGACTGGGAAGCATACCCTGAGATTGAGGTGAGCATGCAGTATGTCTATTTAGG
AGTGTTCTTGGGGTCAACGTGTAGGGGCAGAGGGAGAAGTTGAGCTCTGACGCAGTCTTAGTAAGGGC
CTCAGCTGACCGTTCAGGGAGTTCTTAAGCTGGAATGACCCTTCAGAAGTGCTAGGAAACGAAGAAAG
GGGACTGGATCTTTATAACCCCGTGTCAAGTCATGCACTGGATGTGGGCTACTCCAGGAAGGCAACGA
ACTTTAGCAAGATGATTCTCTTTAGCCACGGGAATTTCCATAAGGGGGCTGCTATGGTCTGAATGTTT
TTGTCCCTCCAAAATGTGTATGTTGAAACCTAACACTCAAGGTGATGGTATTAGAAGGTGGGGGTTTG
GGGGGGTGATTAGGTCATGCGGGCTCTGCCTTCAGAAACAGGATCAGTGCCCTTATAAAAGCGGCTCC
AGAAAGCTTCCTTGCCCTCCCACCATGTAAGGACACACCGAAGATGCCATTTAACAGGAGTGGGCCCT
CACCAGACAATGAATCTGCTGATGTCTTGATCTTGGAATTCCCAGCCTCCAGAACTATAAGCAATAAA
TTCTGTTGTTTATAAATTACCCAGTCTAAGGTATTTAGCTATAGCGGCCCAGACTAAGACAAGGGCTG
ACAGCTGAAGGCTGTCTACCAGCAGCACTCCTAGCAGCTGGGGAACTAAGTCCTTCATTTCCAAAGGG
GAATCTAGGCAGCATATTTACAGCTTTTCACTACAGATAAGCTCATTATTTCAAATAGGGACTAGCAG
GAAAAAATTAAATTGCCCAAAATTTAGTGGGATGCTGAAATAGATTGTGGTGTGTAAATTGGAGTATA
GTGAGGAGAGCACCTTCAAACCAGTATGTACTACATGATATTGTTTTTGTTGCAATATTTATTATATA
CCCAAACACACATATATTACTTTTAGAAACACACACCACATATATATCTATGAATATTTTATATACAC
ATAGGGAAGGATTGTTGATGTTATTTATGCTATTTTAAAGATCGATGTTTTCATATAATTATGTATTG
GTTATATATTATTTCTTGATATAAGGTAAAAAAAAAAAGCAAAACAAACTTTAAGTGATCACTATGAA
AAGAATCCCAATGCTGCACATTTAGGTTTATCCAACTCTTCCCATTAAAATATTAAATAGTAGAAATA
ATTGTGAATAAGAAAGAGCAGATTTTGAAAAATGGAAAGAAATGCTTAAAGACATAGCATTGTTGCCC
AACCATCATTATTTAAACATACAGTGTTTGGCTTTGACCAAATTGCCTTCAAACACTTCCTTTTGGCC
CAAAATGTTAGGTCATATATACTACCATAAAATTCATGATGCTTACCATGCATTAATTTCTAGTATAT
ACCAGGCATTGTGCTATGCATATCATATTCAATATTTCTAATCCTCTCAAAAGTGGTACAAGCTAACT
GGCGTTTTTCTTGTTTTGAAAGGGAGAAACTCAGAGAGGTTAAGTGACTTGCCCAAGGCAATGCCATT
GATAAGTGCCAGATTCTATCACAGGTTTATTGGCAACAAACCATATGTGCGCGTGCATGCGCGTGTGT
GTGTGTGTGTGTGTGTGTGTACACATACACGAATAACATATATGGTATAAATACGTGGAAACATAATA
AACTGCATTGAGCTGCGTTTATAATTAGTATTTAGGACATGTTTGGCAAATAAAAACAGTGGAGATTG
AAATGGATTTGCTTAGGAAAAATGATACATTAAAATAGGCTTTATTATGAGTCTTCAACTATTCTGTG
AAAATAGATACCCAGGGAAGAAATAATAGAGAATATGAATCTTGAGCAGGCAACTGAGAACTTGTCGA
AGAGCCAAGATAAAAATGTCAGAGAGGAGAATATTTTGGCAGCTCAGATGAGCCCCCAGAGGGTGGGA
GGCAATGATCTCACCGCAGTCTCGTATCTGAACCCCAGGTTTTTGCATCTCCATAAAGTAATTTCTTA
CACCCCTCAATAATGATCGGGCTTACTCTCAATCTCTCGCTCTCTCTCTGTGTCTCTCTCACGCACAC
AAACATGCAGAACATTTCTTGCACATGCATAACTCATAAGACGATTATGTAAATACCAGCCTTTTTAT
TTCATAACTAAATTACAAGGCCTGGTTATTGTTTGGACTGTGAAAAAATAATTATGTGAATAGGTGCC
TCAAGATGAAAGACAAGGCAAGATTGTGAAATTATTCATATGATAGTAATAGTATGCAAAAAATAACA
CAATCTTTAAAGATCTTTAACGACCTAGTTATAAAACCATGCTTTATAACAAATATAACCATGAGGAA
ATAAAAAGAAAAATGTAATAATATACTCCAAGAATAAAGTCAAATGTATTGTTGAATGTAAGGAGTTG
GTTACACTTCCTTATAGTGGAGGTTATTTTAAAATTTGTGGCTTACGTGGTGTTATGAATTGCCCTAG
ATCAACACTATTATGCAAGGCCAACTATTAGGTTATTTTTGGTAGATAACCACAGCAAAACTTTAGTA
TAATAGGTAAAGGTTAGCTACACTCCCATACCCTCACTCTCAGGTGTTGTCATACTCCGTATAAAAGG
TTCAATCAAGGGAGACATGAGAATATTCCAGAATCTAGAGGCAGGATGCAGTTAACCTTAGAGAAGGC
ATCAGACAACTAGAATCTTCGGATTCAATGTGGAAACAAAGCATAGTTTAGGCATTAAATCTTGGGCA
CCATTCCAAAGAATACAGGTTCCATAACTTACTATATTTTTATACCTAGCAAGCTAGAGATGAGGAAT
TGCTCTCAAATATTTTAACCAAAGCATGTATCTTAAGTAACACTAATCTCATAAGTGAAAACTCATTT
CTAATATTCATTTTGCTCATTAGCAAGGCCTCTAGTGTTGACTGTGATAAAAAATAGTTCAAATGCTG
GTAGAACCCACCCCAGGAGACTGGCCTTTCTGATTAAATTCTAACTCTATCCCCACGTGAATTCCTGA
CTTAAGTAACTGAGTTCCTGCACATCAGAATATAAGTATATTATAGATATAAAAACATATGTAATTAA
TAAATATTTTAAGTGAGACACTTCTTTCATCTTTATGGCTTAACTATATCAGACATTTGATTATTTTT
AGCGGTCTAACTACAAAACAAAACACAAAGCCCACAACTAAAAATTTCTTTGTATATATTGCAAAGAG
GCAACCATTTGGTGTCAATTCAATCATGAGTGAAATGCTATTATACGAGTACATCTCCCTGGCTTGTA
TGGGGGTAATAGGGCATGGAATTTACAGATTCACAATAACTGAGATATTCACAATAACAAAGATATCA
ATATGTAGCTTTTCCCATAACTTTGTGTAATGAAATCCTCAGTTTGTGCTGTGTAAAAAGCTTATTGT
TTACTTCTCATGAAAATCATCTTAGTTTTTATCTTTATTTAATAGTCTGTAATTTGGGGGTAATACAT
TCGTTTTGTTGATACTATGTGAAGTGGCAAGCAGAAAATTCTAACAGGAATAGATAAGCAAGTATCCT
ATAAATCAGAGTCAGTGTCTCTCTCTCTCTCTTTTAATGAGTCAGTCTGTCTCTCTCTCTTTTTCCCT
GCCTGGCTATCTATCTGTATTTTTCAGTTTTGCTTTGCAAATAAGAGAATTGTGTGTTGTAAACCAAC
CAACTTACCATTAATTTTCTCTGAATTCAAAAGCAATTACAAGCGGACTCTTGAGTTTGTGCTGCCTG
GTTGTCTGCATATAGGCCAGATGTCTAGAATAGGATCTTTATTTACTATTTTTACCCTCCTAATTTCA
TGGTAACTCCAAGGTAGATGATATTTGTAATCGTACACTACTTGTCAGAAATCTTTCTAATAACACTG
CTATTTTATAAAAATAAACATTAATTCAGTATAAAATTTTATTTTAAATTGTTAATTCAAGCAAATCA
GTGAGGTAACTTTTACACTGCCGAGCGTACGTGTGTGTGGATTAGTACAGCCATGCCATAGACTTCAC
TTGTAATCTTTTCTTTATATTTTTTATACACCTGAAATGTTCATCATTGTGCTGTAGAAAACAATCTC
ATTGTGTTTTTAAAAGCTAGAGTGGGTATTGAGAAGGGGAAGAGGATCATAGAAAAAGTTGGTTAACA
TGCTACTTAACACTTCAAATCTTTACTCGATGTCATCATCAGCAACATTTTAAATTTATGCTTCTACT
AGTTTGCAGTTCTTTTCCTTTGATTATTCTTATGATACAAGCCTTTCCACACAAAATTTATGTACAGG
AATTGTGTAGAATTTTTCTTTGGAAAATATGGTGATTTATTACAATTTGGGCAACATCATCATTTTAA
AAATTCAGAATTTGATTTTTCTCAGAATCATCAGAAAGAATAAAGCATATATATGGTTCATGTCAGGA
GAATTAGAACATGAGAATTAATATATCTCTGATCTTTTAAAATATTTTCATGTTTGTGAATCAGCAGA
TTTTTCCTAGTTTGAGATTTAAAAAATCTAGATATAATTAAAATCTCACTGATGTTTCACCATCAGAT
GATTTTATATTTGTATTTTCTTCCACTTCATAACTTGTATAGAGAAGAATAGAAGAAAGAAAAAGGGA
GGATTGATAATCTTTCTCTCTCAGTTCTTATAGCACTTCATTTTTTAAACTTATTACTTCCTTCTGCC
TGCTTTGTTTGTCTACATGTTTGTATTTCATGATTTCTTAGAAATCCATCTACTGCCATTCTGAAGGT
CATTTACCTGAAAATGATAGAAAGCAGCATATATTCAAACAACTGCAGAGTAATTGTCTATATCAGTT
ATCATTGTTCATTACTTTTCTGTTTTAGGATTGAGGGGCTGCCTCGCCACCTCCCTCACACCCCCAGC
ATATTATCACAAAGCCTACTGATTCATTCACATCCCTGGGCTGAATTTGCCACCCACTGTGTGTTCCT
GTTGTTTTGTGTATGGAAGTGAAAAGATTTAATTTGATGTTGTTGAAAAGACACAGAGGCTAACTTTC
AATTTTCATATGTAGTTCTTCCCTCTCCCTCTGCACCACCTCCTTTACTTGTTGAGAAAATTGCCCTC
TCCATGGTAACAATAGAAGAAGCTTTCAGATTTTAGTAGTAGTTGTTGCAGAGAAAAGAATTCAAAAA
GTAGATGAAGTTTAAAAATGAAAAAGAGAGAGGAAGACAGCTGGGAAGAAGGCTTAATGTTTATGAGT
GGGTGTGGAGGGGAAGAACTAAGTTGAATGAACAAAGCTGAGCTAAGGGGAAGATGGTTTTTCTGCAT
CCCAGAAGGCAATACCCTAGCCTTTCCTGCAGCCTTCACTCCCCAAAAGATAAGAGCTTTATCTGAAA
TTCTTATAGGATTCATTCCTGAAGAGCAGCTTGTCACCAAACAGAAACACTGTGATTTCCTCAGGGAG
TCACAGTTTATTATTATTTTTTTAATGTAACGCTTTTGTGAACTCCAGTTTCCACCTCAATTCAAATG
GTCTTTTGGTTACAGGGTGAAAGAGACCCAACAATACACCTTTCCCACTTCCGGAGGCCTTTGGTTAA
ACCATGTCTGCCACAAGGACACAGGAGCCTGGTATGACTGGTTGTTTTTTGTTTGCTTTTTTGCCTCC
TGTGCTTTCTAGATTGTGAGATACTGTAACTCTTGTCGATGACACATAGTACCGAACCCACCCGAAGA
AGTATGTCAGTATGTCACATTGTGACAAACAGCTTCTCATGCTAAGTAAATGCAGAACCATTGTGAAA
GGTTTAATAATGCCCACTCCTCCCCCGCCAAAGATGTCCATATCCTAATCCCAGGAACCTGTGAATAT
GTTACCTTACATGGCAAAAGGCTTTGTATTAACAGATGTGGTTAAGTTAAAAATCTTGACACGGAGAG
ATAGCCTGGGTTACCCCAGTGCGCCCAATGTAATCACAAGAGTCCTCCTAAGAGAGAAGGAGGTGATG
ATACAAGCAGAGTAAAAGAGAGATTGGAAGATGCTACACTACTGGCATTGAAGATGAAGGACAGGGCC
AAGAGCCAAGAAATGCAGGCAGGCTCTAAAAGCTGGAAAAGGCATGGAAAAGAATCCTCCCCTACATC
CCTTAGAGGGAATGCAAGCTCTGCCAACACATTGTTTCTAGCTTGTGAGACCCATTTTTTGGACTTTG
GACCTCCAAAATTGTAAGATAATAAATTTGGGTTGTTTTAAGCCATTAAGTCTGTAATCATTTGTTAC
AACAGCCACAGGCAGCTAATACAGCCATGAACATTTAGTAATGACTAACTTTGCACAATTTTAATACA
AGCTTCTTATTAAGGTTTATTTTTTCTTAATTACAAGGAATAAAAGTGGGGTCTGGGGGCAATGTCAT
GGTCCACTCCGTTTTAGCCATATGAATTTGTATTTCCAGCATTAGAACAAAAGGTGACAAATCTGAAT
GTATTTGTGTGAAATAATAATAAAGCAGAACAAAAAGGGAAAAGTGTCCAGCTGGAAATGAAGTTAGA
GAAAGATGAGGAGAAGCAAGCCAATTGTGTAGTTTTCCCTTCTGCTTTTTAAAATCATGATTTGTTTA
ACCCACTGAATTCTATTTTAGAAACAGGACTGCAAGGAAGTGTTGATGGATTTGGTGGCATGAGAACC
AGAGTCACAGAGGCAGGAAAGTAAGGAATAAGTGTTAGAATAGGAAGCAGAGTTGCTTGGGAAGAGAC
CTTATGACATGTGGACAGGGCTAGACTTAGGAGTCAGAAAGACCTGAGTTCAAATGCTATCCTTTAGT
ATAGTTTGAAGTCAGGTAGCGTGATGCCTCCAGCTTTGTTCTTTTGGCTTAGGATTGACTTGGCGATG
CGGGCTCTTTTTTGGTTCCATATGAACTTTAAAGTAGTTTTTTCCAATTCTGTGAAGAAAGTCATTGG
TAGCTTGATGGGGATGGCATTGAATCTGTAAATTACCTTGGGCAGTATGGCCATTTACACGATATTGA
TTCTTCCTACCCATGAGCACGGAATGTTCTTCCATTTGTTTGTGTCCTCTTTTATTTCCTTGAGCAGT
GGTTTGTAGTTCTCCTTGAAGAGGTCCTTCACATCGCTTGTAAGTTGGATTCCTAGGTATTTTATTCT
CTTTGAAGCAATTGTGAATGGGAGTTCACTCATGATTTGGCTCTCTGTTTGTCTGTCGTTGGTGTATA
AGAATGCTTGTGATTTTTGTACATTGATTTTGTATCCTGAGACTTTGCTGAAGTTGCTTATCAGCTTA
AGGAGATTTTGGGCTGAGACAATGGGGTTTTCTAGATATACAATCATGTCGTCTGCAAACAGGGACAA
TTTGACTTCCTCTTCTCCTAATTGAATACCCTTTATTTCCTTCTCCTGCCTGATTGCCCTGGCCAGAA
CTTCCAACACTATGTTGAATAGGAGTGGTGAGAGAGGGCATCCCTGTCTTGTGCCAGTTTTCAAAGGG
AATGCTTCTATAGTACAAGGCTACAGTAACCAAAACAGCATGGTACTGGTACCAAAACAGACATATAG
ATCAATGGAACAGAACAGAGCCCTCAGAAGTAACGCCGCATATCTACCACTATCTGATCTTTGACAAA
CCTGAGAAAAACAAGCAATGGGGAAAGGATTCCCTATTTAATAAATGGTGCTGGGAAAACTGGCTAGC
CATATGTAGAAAGCTGAAACTGGATCCCTTCCTTACACCTTATACAAAAATCAATTCAAGATGGATTA
AAGACTTAAACGTTAGACCTAAAACCATAAAAACCCTAGAAGAAAACCTAGGCATTACCATTCAGGAC
ATAGGCATGGGCAAGGACTTCATGTCTAAAACACCAAAAGCAAGGGCAACAAAAGCCAAAATTGACAA
ATGGGATCTAACTAAACTAAAGAGCTTCTGCACAGCAAAAGAAACTACCATCAGAGTGAACAGGCAAC
CTACAACATGGGAGAAAATTTTCGCAACCTGCTTATCTGACAAAGAGCTAATATCCAGAATCTACAAT
GAACTCCAACAAATTTACAAGAAAAAAACAAACAACCCCATCCAAAAGTGGGCGAAGGACATGAACAG
ACACTTCTCAAAAGAAGACATTTATGCAGCCAAAAGACACATGAAAAAATGCTCACCATCACTGGCCA
TCAGAGAAATGCAAATCAAAACCACAATGAGATACCATCTCACACCAGTTAGAATGGCAATCATTAAA
AAGTCAGGAAACAACAGGTGCTGGAGAGGATGTGGAGAAATAGGAACACTCTTACACTGTTGGTGGGA
CTGTAAACTAGTTCAACCATTGTGGAAGTCAGTGTGGCGATTCCTCAGGGATCTAGAACTAGAAATAC
CATTTGACCCAGCCATCCCATTACTGGGTATATACCCAAAGGACTATAAATCATGCTGCTATAAAGAC
ACATGCACATGTATGTTTATTGAGGCACTATTTACAATAGCAAAGACTTGGAACCAACCCAAATGTCC
AACAATGATAGACTGGATTAAGAAAATGTGGCACATATACACCATGGAATACTATGCAGCCATAAAAA
AGGATGAGTTCATGTCCTTTGTAGGGACATGGATGAAATTGGAAATCATCATTCTCAGTAAACTATTG
CAAGAACAAAAAACCAAACACCGCATATTCTCATTCATAGGTGGGAATTGAACAATGAGAACACATGG
ACACAGGAAGGGGAACATCACACTCTGGGGACTGTTGTGGGGTGGGGGGAGGGGGGAGGGATGGCATT
GGGAGATATACCTAATGCTAGATGACGGGTTAGTGGGTGCAGCGTGCCAGCATGGCACATGTATACAT
ATGTAACTAACCTGCACATTGTGCACATGTACCCTAAAACTTAAAGTATAATAATAATAATAATAATA
AAATCTCAAAATAATTAAAAAAAGAAACAAACAAATGCTATCCTGATCCTAACTGGCTGGCTGTCTTT
GGGGAAGTTGGTAATCTTTTCTGTGCTTATTTCCTCATGTGTAAAAAAATGAATATAGTACCCAGCTA
GGTAGAGTTGTTGTTGGGATTAAATGATGACTATAAAGCATCTAGCCCAGCTTCGGCTACATTATAGC
TGCTTACGAAATTGTAGTTACGATGTAAAAGAGAAAAACACTGGAAAAGGAGGATATGGGCCATTTTA
TTCCACCTTCACCACCTTTTAGCTTGGTGACCTTGGGCAAATTATGCTTCATTCCGTGCTTCATTTTC
CTTGTCTATAAAAGGGTGTAAGTACAGAACCATTGAGGGGTGGTCATTATTAACCTACCTCAAATGGT
GTCTGTAAGTTAATATATATTGTGCTTTTCCTATGTACAATATCTAGCACATAATTACAAATCAAATC
CATCCCATGTGCAATATCTAGCACATAGGAAAAGCACAATAACTAGTTATTACTCTTGTTGTAGTAAT
TGCTACGCTGTAGGAGTTTGAATTGTAAGGCAGTGGAGAGTCACTGACCTTTACGAGAAAGTGTAGCA
GAACATTTGAGTAGATAGTAATGGGGAATATTACATAAATGGATAGATATTAGGGGCAGATATTACTA
TTAAAATATTACAGCATGGATATTTATTAAGGCCAAACTGGTTAATTAGTTGCATCTCTCAGGTTCCT
AATGTTGCTTAATTTTTTAACCTCCCATTTTGTGCTGCCCTTTGTACGAATATTTAATGCTCCCAACA
CCTCTTCAGTAGCACATGTACTGTGAGTTTGTTTTGTTATTACTTGTGTGTATTAGCATTCCTTTGTG
AACCAAAAGCATGGAATTAGCTGTTGCCTCTAGGCTACCTAGTTTTGTAGTTTGGATTGAAGCCTTCA
CCTCAGTAACACCTATTCTGTCTACTATCTTACAGAAAACTTGTAAAATTAAGACAGATCATTAATAT
AGCACAAAGAGACAAAGGGCAGAGAACATTGAGATACTGGATATTGGAACCACCCAATAGTGTTGATT
TATTTATGATTATCAGTTTTTGTCTCTGCCTAGCCTCATGCCACTAAAGTCTCTGAGGCAACAAAGAA
TAAGCAATTTTGCTCACCTTATACAAATAAAACACAGAAAAAGGAATCACTAGAGAAATGGTACTGCA
GCCTTTCTGCAGGGATTACTGCTTATTTTTAAATTACTTAAAAGGTATTGAAATTATTGTTCATAATG
AGAAACCTGCCTAATAAAACAGAAAATTAAACTTAACACTTCCCTATAATGTAAACAGCTCGGTTAGG
AACACAACATTACAGAAACCACTTAAGAATTGATTGTACTTGTTCTTGGAGCAGAACTAGAAGCTCAC
CGTTTAGAAGCTGTGCACATTTCCCTATCAAACAGTACATAAAGTTTCCATATTCCTCAGAATCGGCT
TCATTTGTGCCATGTGTTTGCTTGGAACTATGCCACAGAAAGCAGTTCTCCCCCTCAAGCTGGGCTCC
TTTCATGCCGCAGTGCAAGTGTGTGATATACTGGCACCATGTGCTAATGTAGACCCATTTTTATATGA
TAAGAATTAGTACGGCCTAGGGAATAGACAAGTATGTCTAAAATCCTCCCCATAGAATATGTCCCTTC
CTTTAAAAGCTGTCATACTGTAAGTTCCAGCTGAGTTAAAGGCCACTGTGCTCCTATAGGGAAATATA
TTCTATTGTAATTTTTACGTTCTCCAATAACAGTCTGTTCTTTGTTTACTGAAGAGAGCTTTCATGTC
ATAAAATGGTGTTTTTTGACAGAGAAGCAGAATCATTGTTTTATTATAGAAATTTGCTCTTACAACAG
CAAAAATAAATAGCTCATCTCTTAAGCTCCTGATCAATGTCTAACACCTCCTACCCCCAGCAACACTT
CACTGCAAGTATATTAACACTCTATAATAGCAATTCCACTCACCTACCAAGAAATGATCTTCACAAAT
GATTTACAGCTAAACCAGAGCTTAAACACATAGCACCCAATCAAGGGCAGATTTTTATCTTTTTCCCA
GTCATATAAGTTCTGAGAAGAAATAGATTAATGTTGATCTCCCAGACAACTGCTGAGAAAATGTACAA
AGGATGTTGTTTATTTTGAAGAATGAGACCTAGTTGTTAAGCACTTTTTCCCCTTATATGTACGTCCA
AAGGTAACCATTACACCATTTTGATGCAAATTTAGGATATATATTTATTCATACCTCTCTTCTCCATT
CGGATGTTGTCTGTGTGAGTGCTCACAGACACATGCACACATACACACATGCACTCCTGTTTCACACT
TATTTGTAAAACTCACAAGGATTTCCAAGCCATTAATATAGCATTGTTTAAGGTGAACACATGGTTGT
TCACCATCCATATGTATCTTCACTTTGTAGCACTCAGAATTTGGCAAAATCAGAAGGCTGAAACCTCA
TGGATTAAATATATTCTATATAACATATGTCTTAATTGCTGTTACTGTAAAGAAACCTGGACTAGCCA
TATTTGACTAATTTCTACCTAAGGTATTTGAATTCTTATAAATAGATTCATTGCTTTAATCACACAAG
AGTGGTTTATATGAATGTAATTATCTCCACTTTATAGCTGAATAAACTGAGCCTGATTCTATCCCTAT
ATGGGAAACATGAATTGAACAGCTGTGCCAATTATTTTGATAATTCAAATTTCACATCTACCATGTGA
AGACAGCAGAAGAGGGTTAGGGGGCTTGAATTATTCTGATTAACTGTGTTCATGAGTGTAATCGCCTC
TAGATAATCACTCATTTCTTCACTTCACTTCCCATCTACAGGTAGTATCAGCGAATGGTAACATCTCT
TGCTTTGCCTCAGTTTATTGATGGCTGCCGTTAGAAATAAAAAGCATGGTTTTGTTTCAGTACTTAAA
TGAATAATATCTTCAAAATGTTTTTAAAACGTGAAAAGGTTGAATGCATTTTTAACAAATGTTTTGTT
AGCTTTGACTTTTATTTTTGAACAGATGAGCACAATACCCCAGTACTCCTTTCCTAGAAATAGGAGTA
CTACCTGAAGACTTATTTCCCAAAGAAAAATATCAGGTCTAGTGCAGCAATACGTATTAAGGGCATTG
AAAAGTTATATTCACAAAATGTGACATCATAACATATGTTAATACTTCTTATCACTGATAATAATCCT
TGAAGTTGTATTTCCAGAGAGATCTCAATTTCTTCTCACACTCTGAAAGTCTCTGTTTATCCTTTAGA
GTAGGAATGTAAGAATTTAACAAAACATTCTGAATGTTTACCTTTTTTCTAAACTGAAACTACAATCC
CTTTTTACCCCTATATAGTAAAATATAATATTACAAGTAGAATCAGCAAATTTGTTTAATAATTCTTT
GGGACAGTTTTTACAAGCAATGGGGTTGAATTTATGTTCCTTGTGTGCAGTGGAGTTATTATATTCTT
CTTAAAAAGATGCATGAAGGTAAATTAGAAATGTTTTACATGTTTTCATGACAGGACATTTAATCAAA
GAGGAGATACAAGAGGCTTTTCTTGGGTTACTGCAATTTAATTTTCCATTTCTTTCTTGGAAGGGACA
TTGGATGCAGTTGTACGAGGTTAATATTTCTAACATGCCACTTTTATTGTGGCATTCTTCTGCTCTCA
AACCTCTGATGATTTCCCATGGCCTTCAACATGATGTCCTTATTTGGGCATCTAGTGTTCTGAGCCCT
CACATTCTGGCCCCAGCTTCCCTTCTCAACTTGATCACAGCCATCGTAATTCTGCTAACTAATTACAC
AGCTGCCCTTCCCACTCTTTCTCAACCACTCTGCTGTATTCTGACTTCTACACTTTAGTTTTAAAGCT
ACTCCTTGTCCTGAAATTCCTTCTCCCATTAGGTCATTATTAATTGAGTTCATCCTCTAAGTTACAGT
TCATGTTGCTGTTCCTCTATGGCACCTTCCCTGAACCTGGTCCCATATAAAATCCCATCTCTCAGAAT
CCCATTAGGGTAGGATATGTGGTCTGTAGACTATTACGTTTGTCATTTACATATTGTCTTCTATTATT
GGGTAACTGCGTGTGCGAGCATGCATGGGCTGGCCTGAAGGTCACCTCCCCAACTGCATTGAAAGTTC
ATCACAAGTTCAATTATTTCACTAGAGAGTCTCTTTCATGTCATCCATGAGGCACATTCCCTACTGTG
ATGTGTTATGCATACAATTATTTCAATAAATATTTTCTAGCTCTTTGATTGACCAAAGCTTAATTACC
TGTCAACTCTAGCCTCTTGTATCTGGAATTTCTACAGTCTTTGGATAGTATCTTTAGGATGCAAAATT
AGGAGGAGTATGTACCAGGCAAACTATTACAAATAATGCCCTCAAATAGTTACATTTCACTATTCATG
TCTTGTAATTTATCTTCTGCTTTGGTATTTTAGTACACTTATGATTCAATTTGCTGTATAGATTCCTC
TGAATAGGGACAAGAGAATTCGTCTTGATAAGTGGAAGTTCGAAGGATTCCAAAATGATGTTATTCAA
GGTAGAACAAGAAATTAATACTGAAAAAATTGAGGAGTAATAATCCCCAAATATGTACATGCGTATCT
CGTTTTATTGGGTTTCACTTTATTGCACTTTGCAGATATTTCACTTTTTGTAAATTGAAAGTTTGTGG
CAAGGCTGCATTGAGCAAGTCCGTCGGGCACAATTTTTCCAACAGCATGTGCTCGCTTTACGTCTCTG
TGTCACGTTTTGGTAATTTGCTCAATATTTCAAACATTATTATTATTATTATATTTGT7ATGA7CTGT
GATCAGTGACCTTTGATGTTACTATTGTAATTGTTTTGAGATGTCATGAACTGCACTCATATGAGATG
GCAAACTTTGTGGGGTGCAGTGGCTCACACCTGTAATCCTAACACTTTGGGAGGCCAAGGCAGGAGGA
TCGTGTTAGCCCAGAAGTTTGAGACCAGTCTGGGAAACAAAGTGAGACCCTGTCTTTAAAATATATAT
GTAGAAAAATTAACTGGGCATGGTGGCACATGGCTGTAAGGAGCCCTGCCAGCTGCATGGGAGGCTGA
CACAGGAGGATCACTTGAGCCCAGGAGGTCAAGGCGGCAGTAAGCCATGTTCACTCCAGTGCCCTCCA
GCCAGAATGACAGAGCAAGACCCTGTGTGGAAAAAAAAAAAAAGACAAACATTTTTTCAACTTTGATT
TTAGATTCAGGGAGTACATGTGTAGGTTTATTACCTTGATATATTACATGATGCCGAGGTTTGGAGTA
CAAATGATACTGTCACCCAGGTACTGAGCATAGTAACCGATAGTTAGTTTTTCAACCCTTGTTTCCCT
AGCTCCACATGAGAACACGTGGTATTTGGTATTGTGTTTCTGCATTAATTCACTTAGAATAATGGCCT
CCAGCTGCATCCATGTTGCTGCAAAGGACATGATTTTGTTCTTTTTTATGGCTGCATAGTATTCCATG
GTGTATATGCACCGTATTTTCTTTCTCCAGTCTGCCACTGATGGGCACCTAGGCTGACTTCATACCTT
TGCTATTGTGAATAGTGCTGAAATGAGGATGAGAATACATGTGGTTTTTTAGTAAAGCAATTTGTTTT
ATTTGGGCTATATGCCCAGTAATGGGATCACTAGGTTGAACGATAGTTGTGTTTTAAGTCCTTTGAGA
AATCTTCAAACTGTTTCACTGTGGCTGAACTAATTTGCATTCCCAGCAACAGTGTATCAGAGTTCCCT
CTTCTCTACAGCGTCAGCAGCATCTGTCATTTTTTTGACTTTTTAATAATAGCCAGTATGAATGGTGT
GAGACGGTATCTCGTTGTGGTTTTGATTTGCATTTCTCTGATGTTGAGTGATGTGGAGCATTTTTTCA
TGTTTGTTGGCCACTTGTATGTCTTCTTTTGAGTAGTGTCTGTTTATGTCTTTTGCCCATTTTTTTTG
ATGGGGTTATTTGTTTTTGACTTGTTGAATTGTTTAAGTTCCCTATAGATTCTGAATATTAGACCTTT
GTCAGATGCATAGTTTGCAAATATATTCTCTTATTCTGTAGACTGTCTGTTTACTCTGTTGATAAATT
CTTTCACTGTGAAGAGCTCTTTAGTTTAATTAAGTTCCACTTGTCAATTTTTGGTTTTGTTATAATTG
CTTTTGAGGACTTAGTTATAAATTCTTTCCCAAGTCTGATGTCCAGAGTGGTGTTTCCTAGGCTTTCT
TATAGGATTCTTATAATTTGAGATCTAATGTTTAAACCTTTATTCCATCTTGAGTTAATTTTTGTATA
TGGTGTAAGGAGGGGGTCCAGTTGCATTCTTCTGCATATGGCTAACCAGCCATCCCAGCATCATGTCT
TAAATACAGAGTCCTTTTCCCATTACTTATTTTCATAAGATGGCAAACTTAATCAATCAATGTTTTGT
GTGTTCTGGCTACTCCACTGATCAGCCATTCCCTCATCTCTCTTCCTCTCCTTGGGCCTCCCTATTCC
CTGAGACACAACAATATTGAAATTATGCCAGTCAGTAACCCTACAATGTCCTCTAAGTGTTCATGGGA
AAAAAAAGAGTCACATGTTTGTCACTTTAAATCAAAAGTCAGAAATGATTAAGATTGGTGAGGAAGGC
ATGTCAAAAGCCAAGACAGGCTGAAAGCCAGACCTCTTGTGCCAGTTGGCCAAGTTGTGAATGCAAAG
GAAACGTTCTTGAAGAAAATTAAAAGTGCTACTCTGTTGAACACAGGAATAAGAAAGTGGAACGGCCT
TATTTTTAATATGGAGAATGTCTTAGTGGTCTGGATAGAGGATCAAAACAGCCACACCATTATCTTAA
GCAAAAGGCTAATCTAAAGCAAAGGACTAATTCTCTGCAATTCTGTGAATGCCGAGAGAGGTGAGGAA
GCTGCAGCAGAAAAGTTGGAAGCTAGCAGAAGTATGTTCATGAGCCTTAATGAATAAGCCCTCTCTAT
AACATAAAAGTGCAAGGCAGAGCAACAAGTGCTGATGGAGAAGCTGCAGCAAACTATCCAGAAGATCA
AACTAACATCTAAGTTAATAAAGGTGGCAATACTAAACAACACATTTTCAATATAGACGAAACAGCCT
TCTATTGGAAAAGGATGCCATCTAGGACTTTCATAGCTAGAGAGAAGTCAATGCCTGGCTTCAAAAGT
TCAAAGGACAGGCTGACTGTCTTGTGAGGGGCTAATGCAACTGGTGACTTTCAGTTGAAGCCAGTGCT
CGTTTACCATTCCAAAAATCCTAGGGCCCTTCAGGTTATGCTAGATCTAGTCTGCCTATGCTCTGTAA
ATCAAACAACAAAGACTAGATGACTGCACATCTCTTTACAGCATGGTTTGATGAACATTTTGAGCCCT
CTGTTGAGACCTACTTCTCAAAAAAATGTGTCTTTCAAAATATTACTGCTCTTTGACAATGTCCCTGG
TCACCCAAGAGCCCTGAGGAATATGTCCAAAGAGAATGATTTTATTTTCATACCTGCTAACACAACAT
CCATTCTGCAGTCCTTGGATCAAGAAGTCACTTCAACTTTCAAGTCTTATTACTTAAATCATACATTT
CATAAAGGTATAGCTGCTATATTGTGGTGAGTCCACTGATGGATCTGGATAAAGTAAACTGAAAACGG
AAAGTCCTCACCATTCCAGATGCCATGAAGAAAATTCATGATTGAGGGGAGGAGGTCAAAATATCAAC
ATTATCAGGAGTTTGGAAGTAGTTAATTCCAACACTCATCAATGACTTTGAGGGTCCAAGACTTCAGT
AGAAGAAGTCACTGCAGATGTGGTAGAAATAGCATGAGAACCAGAATGAGAAGTGGAGTCAGAAGGTG
TGACTGAATAGCTGTAATCTCAAGGTAAAACTTCAGCGGATCCAGAGTTGCTGCTTATGGATGAGCAA
AGATTGTGGTTTCATGAGATGCACTCTACTCTTGGTGATGATGCTGTGAACATTGTTGAAATGACAAC
AAAGGATTTAGAATATTCCATAAACTTAGTTGATAAATTAGCATCAGGGTTTGAGAAGATTGACTCAA
ATTTTGAAAGAAGTTCTACTGAGTAAAATGCTATCAAACAGCATCACATGCTACAAAGAAATCATTGG
CTATAAAGGAGAGCCAATCGATGCAGCAAACTTCGTTGTTGTCTTATTTTAAGAAATTGCTACAGCCA
TCCCGACCTTCAGCAACCGCCACCCTGATCAATCAGCAGCCATCCTCACTGAGGCAAGAGCCTGTACC
AGCAAAAAGATTATGACTCCCTGCAGGCTCAGATGATTGTTACCATTTTTTTTAGGAGTAATGTATTT
TCAAATTAAGGTATGTACATTTTTTAGATACAATGCTATTGCACACTTGACAGATGATAGTAGAGTGT
AAACATAACATTTAATGCACTGGGGAACCAAAAATATTCGTGTGCCTCATTTTATTGTGATATTTACT
TTATTGCAGCAGTCTGGAACCAAACACACAATATTCCAAGGCAGTCCTATATATTGTTTCATGTCTCT
CTTTCTTCTAAAATGTGTGTAGGAGAAAAAATTATATCACTTATGTTACTGGGCCATAATATCAAAAG
CCTGCGAATCTGATGCACATGATAAAAACTGGTCTTAAACCTGTCTTGATTATCCTTTGTTAATATGC
CAAATTTATAGAACAATAGAGTTTCAAGAAATGTGAACAATGTAGAATAACTAAAAGATCTAACGTTG
AATAGCTAAAATTATCAACGCCCTTTATATCACTTTAGAAATGCGTTTGCAAATCATTATCAACAAAT
TGTAGCATAAAATTCTTTTTTTTTCTTGACTTTGAAATTGTATTTCAAGATCCGCAATTTACACCACA
TTATTTACTTACTGGCTTGTGAAAGTGAAAGGCATTTTCATTTTTGGATGTTAAGGGTTTTAGTAAAT
GACAAGTAAATCAATCCTTTAAGTTCCGTGTGGTATAATAGCTTGGAAAGGACCATCTTAATCTTTTT
TTCAACACAGGGAGATAATTTATTTTAAAAATAACACACTAATAGTAGATTAATATTATTACCATTTC
AAAGAAGTCACCAAATTTGGTAGGCTTAAGAGGTTTTTTTTTTTTTTTTGAGATTACTATGCTCTTTT
TTTATTTTATTTATTTTATATTTATTTATTTATTTTTTAGTTTTTTAATTTTACTTTAAGTTCTGGGA
TACATGTGCAGAACGTGCAGGTTTGTTACCTAGGTATACATGTATCATGGTGGTTTGCTATACTCATC
AACCCAACATCCAGGTTTTAAGCCCCCAATGCATTAGGTATTTGTCCTAATGCTCTCTGTCCCCTTGC
CCCTCACCCCTTGACAGGCCCCGGTGTGTGATGTTCCCCTCCCTGTGTCCATGTGTTCTCATTGTTCA
ATTCCCACTTACGAGTGAGAACATGCAGTGCTAGGCTTAAGAGTTTTTTTAACTCCCCAAAATATCAA
CAAATTGAAACATTACTACAAAGAAATAGAGAAATAAATTTCACTGACTGTCTTATTGTTTTTTAAGT
TTGAATAGCTAATAATGATTTCTTAAACAGCTATCATATTTTTTATTTTTAAAGCTAGCCAAATGATC
AGTGATTTTTATAATACTGATAAATACTGCTTAGAAAAGGAACATGTGTTCTAGCAATTTCCACACAT
TTCTGATTCTAATTACTTGTTTCTTTTTGTTTTATTTTTATATTTTTAAGTTTTGTGAGTACCTAGCA
GGTGTATATATTTATTTGGTACTTGAGATGTTTTGATACAGGCATGCAATGTGTAGTAAGCACATCAT
GTAAAATGGGGTATTCAACCCCTCAAGCATTTATTCTTTATGTTCCAAACAATCCAATTATACTCTTT
TAATTAATGTAAAATGTACAATTAAATCATTATTGGTTATAGTCCCCCTGTTGTGCTATCAAATAGTA
GGTCTTACTCATTCTTTCTAACTAATTTTTTGTACCCAGTAACTATACCTACACCACCCCCACCTCCC
CACGACCCTTCCCATCCTCAGGTAACCATCCTTCTACTCTCTATGTCCATGAGTTCAATTGTTTTGAA
TTTTAAATCCCACAAATAAGTGAGAACATGCAATGTTTGTCTTTCTGTGTCTGATTTATTTCACCTAG
CATACTGACCTCCATTTCCAACAATGTTGTTGCAGATGACAGAATCTCATTCTTTTTTGTGGCTGAGT
AGTATTCCATTGTGCA7AGGYACCACATGTTCTTTGTCCATTCATCTACTGATGGACACTTAGGTTGC
TTCCAAATCTTGGCTATTGTGAATAGCGCTGCAATAAACATGGGAGTGCAGATATCTCTTCAATATAC
TGATTTATTTTCTTTTGGGTATATACCCAGCAGCGGGAATGCTATATTATATGGTAGCTCTATTTTTA
GTTTTTTGAGGAACCTCCAAACGGTTCTCCATAGTGGTTGTGCTAATTTACATTTCCACCAACAGTAT
ACAAGGGTTCCTTTTTCTTCACATACTTGTCAACATTGGTTATTGCCTGTCTTTTGGATATAAGCCAT
TTTAACGGGAGTGAGGTAATATGTCATTGTAATTTTGATTTTCATTTCTCTGGTTATCAATGATTCAG
TGATGTTGAGCACCTTTTCATATGCTTGTTTGCCATTTGTATGTATTCTTGATCTGCCACAAGTCTCT
AATTACTTGTTTCTTGTACCACTGTTTCCCTTCATTGTAGTCAGTGATTTGGTCAATCAACACTTTTT
ACGTATGGGTATCTGTTAACTGTATTTCTAGGAATGGACCAAGAATTGAGAAATTTATCCCAACCAGA
AAGAACAAAATCTATGGAGGCACAGGATTACTGAAAGCTTTGCTCCTATAGCCTCAGTTTTTTTCTGC
AAGTTCGCTGCTTCCCAGTTGTCCTTGTGATAAAATTCAAAACCTCAAACTGATTTTTAAAAAGCCAA
CTATATACTGCTTCTACTATGTCTACCTAAACTTATTTGCCATTATTTGTAAAGAATTCCAGGCTCTA
ACCAGCCCATTTGAGGCTTTATTTTACGTTCATGCCTTTGTTCATGTCTGTCTTTCCCTTATAATGCT
CTTCTCATTCTCTAGCCAAATCTGCCAAAGTTCAGCTGTAGTGCCATACTTGATATGAAGTCTTTGCT
GAGAATTCCCATATGTGGTCATTTCCTTCACTGATTTGTTTCAATAGTTGTTGCCATTATTATTATTT
TTTTTATACTGTTGCTGGATACTTTCGCAGATCCAATCTCTAACCTGTTGTTCTACCCTAGGAGGTTG
ACCAATATGGCAGTAGCATTGGGCTTGCTTGTCTATTGGCTTGGTCCTTGTGTTGGGAGGCATCAGCA
GATCAATGGATGAGAGGAGAGTGAGTCGAGGGATGGCTAGGTTCCTTTACTCACAGCCCCAGCTCCTG
TCAAGAGGTCTTGTCCCTGCAGCCACTTCTCAGATTCTACTAACTATACCCTCCCCTTAGCCTTTCAG
GCCTTGAGGAGGAAAGCCTCCTCATCCCACTTTGAATGAACTATTTATTGCAAGAACCATGACTGATT
CAGAATATAATCTGTCCTTGAATGAAATAGTTAATTTCCCCTTTTGTATTCTCGTTTCATATCCCTGT
CCCTTTATCCATTCCTATATTATATCATACTATCATATAGCTACCTTATATTATACTATGACATGAGT
ACCTTGTAAGTATATCATGCTATATTATAGTTCTTAAGTGTGTGGGCTTTGGGGCCAACTTACCTATG
TTAGAAGTTCTGCCACTTATTACCATGTGATCCTAGACAAATTGTTTAACTTCTTTTTCATTCATTTT
CTTTACTAGTAAAATAGGGGCAATATTAGTACCCACCTCACAGAGTAATATGATAATTACATTGACTG
ATAGTTTTTATTTAAAACTTTTATTGTTCTTACTATGAAATGGGAAATGTTCTAAACACCTTACAAAT
ATTAACTCTATTAATTCTCATAATGAATCTGAGAGGTAGAGACTCAGTATCTCCATTTCACAGTGCTG
GAAATGATACAGACAGCATTTAAGTAACATACTGAAAATAGTAAACCGAATAGGTGGCAGCCAGTATG
CAAATTGGGAAAGCCTGACTCCAGAGTTCATTCTTTTAACTAGTATGCTGTGATAGACTCTTTTGGCA
TATGGTATGCACTCAATAAACAACTATTGTTGTTGTCGTTAGCATTACTTCCCATTGTATTATTACAC
AAAAAATAATTGTTTATGAGTATTTGTTTGCTAGATTATAAGTTCCTTGAAAAAAGAAGACAAGTTTT
ATTTGTCTATGTGTACTAGCTGAGTGCTTGGCAAATAGTTGCAGTTTAGTAAATGTTTCTAAAACAAA
TTATTAGTTGTTTCTTATGTATTTCCCAAGTCTATCCTAGCCTTGGAAACAGCTAACACTTAGCTAAA
CCTAGAAATGTCATTTGAGATTTCAGCAGCCATCATTGTTGCTGAAGCCACAGGTTCTCCTTTTTATC
TCCAATTTCTTCCTCAGATGATTCACCACTTTCTTTGTCGTTTCCCTACTTCATTTTTCCTATAGTGA
CTTTTGTTCTCCAATAACCATTGATAGTGATGACAGTCCCACCTTGGAACCACTTCTAACTGTCCTGT
TCAGCTTTTCCTGAGGCCAGATTTCCCCCAAAATACATTTTTTAGCTTCATAACTGCTCCTTCCAGAA
ATTTGAAACGCATTCTCAGGAATTAAGCAAGAGGCATTTGATTGACGTCATTTAATTTGTGTTTAAAT
GTGTTCTTCCCATCAACGATTAACCAGTGCTTCAGCCAAGATACATAACTTTTATTCTCCACTAACCT
TAGGGTTGAGGTCACAATCAGGTACGTAATCTGTAGAGCCCAGTGAAAAATGAAAACGCAGGGCCCTT
GGTTAAAAAAAAATTAAGAATTTCAAGATGGCAACAGTAGAGCATGAAACCAAGTATGAATCCCTTCT
AATGCAGATCCTTGTGTAACTAACTGCACAAGTTATACGTTCAAGAAGCTGGTCCTGGTTGAGGTCTT
TGTCTACCTAGGGCACTTCTCACTCAGAGAGGTGGAATAATCTTAACTTTCTGTCTTCCGTCATCTGA
AAACTTGCCCCAAAGTTCCTTTTGCCATCTCTTGCAGCAAACCTAGTGGTTGTTATCTGTTAAGGATT
CCTGGTGGCTTGCTTTAGTTTCCTACAGTTCTTGAGCTGCATGTGTTGAATGGAACTCCACCATTACC
ATGTAACACATCTGAATACTCTTATTTTCCTCCAGTTAAATTCTGCGCTCCTTGGAAATAATGGTCAT
GCACCCTACCTTAGTGATTTCTAAATAGAGGTAGTATGTAAAAATACATATTTACTTGAATTGCATCT
TAAGAGGCCAGCCCATGGGAGGCATGAAGAAACCTATGTTACTAATTAATATTCAATAATTGACAGTT
ACACATTCAGGTAGTAGTGTCATGGAACCATCACGTTACATGGAACTGAAGAGCTGATGAGAGGTTTA
GGGTCTAGGAGGACAAAAGTGAGTGTATTAGTCAGGGCCTGAGGTTATATGTACCCAGACAGGATAAA
ATGGGACAATATTTTATTAGTGGAAATATCTATGTGAAAGAAAAGAAGGAGGAAGCCAAGGAAGGTGC
AAGAGATGTTAGATCAAGATGCAATTCTGACTCTGCAAGGAAGAGAGAGGGAGAGAAGGCTAGGCAGA
AGCATCCCAGTGTGCGGTCTAGTGGAAGGAAATTTTGGCAAAGCTGTTGGGAAGTCATTGAGGCAGAG
CCAGGCAAAGAAGTCCCATGTCTCCCAAGGAAGGCTCTCTGCCTTAGTATTCCCACCACACCCAATCA
TTGGGTGAGGAGAAGTCTGTGAGAAGCTTGGCTTTGGTGCAGTGCAATCATGGATTTCAAAATGCAGT
AACAGGAGTCCTCAGTCAGTTAAGACCCAATAATAGAAGGCCTGCATATTCTCATGGTGGCCACTTGG
GTATGAGGAGCAGTGGTGTTTAAAACTGTTTTGTATAATTTAAATAAAGAAAAGCTGAGGACTACTTA
AGCTTGATTCCTTCAGAAGACAGTCTTTGGCCTTTATATTTCATGTGATATCTTTGCCATATGCTCTG
ATAACTCTCCATGTTTCCCCTACCATAATACCTCAGGTTGTTGCAATTGCTTTTTTATTGCCTGTCAT
CACTACTCGTTTGTTTTCTCTTTGAGAACAGGAATTATTTTCTCCTTCACTGCTACAGCCCCTGCACC
TAGCTCAATGAGTGACACAACAGAAGCACTTAAAAAATTGCTATAACTCAAATTTGGGGGATATTCTA
CAAAATACCTGGCCTCTGTTGGTCAAAACTGTAAGTGTTATAAAGTTCAAAGAAAGGCAAATAACTAT
TTCAACTTAAAAAAGACTAAGGAGATACGACAACTAAAAGCAATGCGTGAGTCTGGACCAGACCAGGA
AATAAAAATATAGCTATAAAGTTCATTAATGGGGTAATTGTCATACTCTGAATATAGAGTATGGATAA
GATTATGGTACTAAAGCCACGCTAAATTTCCTGACTTTGAAACTGAGCTGAGGTTATTTAAGAGAATG
TCTTTGCTATTAAGAAATAAAACCTAAAGTATTTAAGGGTAAAGGGGCATGATATCTGCAAATTATTC
TCAAATGATTCAGAAAAAAAATATATATATATAAAACATTACATATACAGTTATATATCTATACACAC
AGAGAGAATGATAAAATGATAAATAATTAAAAATAATGTGGCAAAATGTTAACAAATGGTGAATCCGG
GCAAGGGTTACCTGGGAGTTCTTTATCTTGCAAATATTCTGCAAGCTTGAAATTATATAAAAATAAAA
TGCATCTTATAAAGTATTTATTCAGTGAATAAAGAACAAAAAAGGCTAACTGCAGTTGGAAGATATTT
ATGAAGTTGGTTATGAAGATTCTTAAGAAGTTACCGATGGAGGTGCTAGTAGAACATTCAAAAAAGAA
GTAGGGAAGGTTGACCAAGTAGGAAAATATCAATATCCAAGCCAGTATAAAATGGAAATGAGAAGTGA
GGAAGTAAGTGGAAGACAATGAGGATGGTTTTCGATTTGGCCACTCTATTTGGAGAGGCAGCCGAATG
CAAGAATAGAAGCCAGAAGAAGATGCTCAGTGAGATGGTTGAAAGCTAGATAGATTACAGCATCCTCA
CCAGTAAAACCCTTTCGGTAACTAGAAAGGCTACAATTTAGTACCTTCCTGACTTCTATGCTTATTTT
CTTCAATACATAAAATGGTTCCGTAAACTCTTTTACCTTCTGAATTCTTTATATTAATTTTTTGAAGT
TGTAAATAAAATAGCATCAGTTCTACATTGTTACATTTCAGCTTAATTCATATTCATTTACTGAAAAT
GGGAACATTTGAAAAATCATCATGGGCATTTATGCTATGTAGATTGTTGATTTTTATAGAAAAATATA
AAAATATGACCAGTTTGATTTTCAAAGTCTTTTCTTAGACATGTAAATACTAAGCATTCAACTCAACA
TATAGAGTTTTTATTTGAGTATTATTTAGGTGGAATTCTATTTTAATGAATACAATAAAAAATTGTAA
TTTTGTCTAAAAGCCTAAAATGCCCTAGTTATAATATGTATGATTTCACTGTTTAACTTCCTATTTCA
TAGGGTTGCTATTTATAACCACTTCACTCAACTCTGGGGGGACTTAGTGAGATTAAAGACTTCTGATT
CACTTTGTATTTGAAGAATTTTTTTTCCTCCATCTTTGCTCAGCTAGTGGAATCCATGATGAATTCTC
ATCTCCAAGGGGTAAGCAGTTTTTAGTAAAGCCCAGTAGCTGACTTATGACTCCTTAGAAATAGCATT
GATTCCTTCCTTCTCCTGTGTTTTGTTTCCTCTAGAATGATAGAATCCATGTAGACACGATCCATTAT
CATGCTTAGGTACTGGTAAGCATGTAATGATTTTAGTTTTGTTCGCTTTAAGTTATTTGTGTCACAAA
TATCTGGGATCATATCAGAGAAATAAATAAGCACAATTAGCATTCTACTTGTTTGTTATGACTAAAGC
TAGGTTGAGGAAACAGAAAAGGACCAGAGGTCATATGAGGATGAAGATAATACTAGGAACAGCATGTT
TGGGAGAGTAACATCTGGTAGGGGTAGCAGATTGGGGGCAGAGAACAGAATTTTATAGATGGATATTT
TGGAGGCAAGTAGTTTGAGTAATGATTAGATCTAAGGTGTTTTCTCATCTGTGGGTGGCTCGAAGGAA
TAGAGGTGAAGGTCAGTTTATTTGAGAAGTTCTGGAATTATAAAACTAAGTTGAAGTCAAAGAAAGTA
TAGTAGCAAATAAATAGAATACCCTTAAAAGGAAACCAAATGAAAAATAATCGTTACTCTCACCATAT
GCTTGTGTTCTTATTAGCAAGAAATTCTTTTAACCACTGTTTTTATAATATCTTAATGAAAAAATACT
GAAGCGTATGCCATATTAAATCCCTCTCTTTATTTCTAGAAAGGGAATCAAAGGAGAAAATTCCCATT
CTGCTATACTAAAAGACCACTAAGTAAAGAGCCTATTAGTGTATGATAAATCCCATAGCAATATACAT
TATCATTTTACAGCTTCTTTGTTGAAATGAATGTTTGTATGTGTTGACCATAGAGTGGGATAAAAAGT
TGAAATTTTGTTTTGAAATATTTTAGAAATGCATAGTTGTACTGCAGTTGTGAACCTCCTTAGATTTT
TAAGGAGGCTGCTTCAAAGGATCTCATTAATAATCTTCTCAGGTGCTTACAAAGCATGTGTCTGTCAG
CAGAATTAGAGAATCACCCAACTAGAGAACAGGTTTCACAATACCCTGAGACCTATTTTGTTCATTAG
AGAGGAAAATGGCTTGTTTTGAGTCTAAGTTGACATGCTTGCTAATTTCAGCAATAAAAGCTGTTCAT
TGTGGTCAGGTTTAATTTAGAGCCTGGTAAGGTTCAGATTAAAGTTGATCAACTTACTTTTACAACAT
ACTTCTTAAATGAACTTTGAAATCTTAAAAGAAGGAAAAAAGTATAGCAAACAGTGAATAATGTATCT
AAAACTGAGAAGCAAAAAAAATCTGGTTATGTGAGAGTGAATTAAAAGAAGAACAACCCAATAAAGAT
AATCTTTGTTATATAAAAATTTCCAAGTATCGAAAAGCACGATTTTTCATGTGAGTTACACACTATAC
CGAATATATTTGTCCACTGCCACATGCATAGTCCCTAGAATAGTGCCTAGTGCTGAAAAATATTTATT
AAAATGAATGGATGAGTAAATGAATTTATGTATTTTGCCAGCCCTGTGTATTTAAAGTTCTCTGTTAA
CTTTGAGGTGAAAATTTGACTTCATCTGAGGTTTCTGGGTAAGTCCGTTTTAAAAATTCTATTGAACA
TATTCAAACATTTTAGGGTAGGCAATTCCAAAGCAACCTTTCAGCTTCCCATGTCACAGATGACCAGA
GTTTCACATTCTAACACTGGAAAACATCTTATTTCATAAAATCTACCTGCTACTATATGGTTCCTACT
TTAAAATTTGTTCAGTACTCTCCAGCTGACTTATGCCACTTACTTCAATAGCTGTCTTTGGCAATTTG
TTCCATATTTCAAACACTCTGTTGTGTAAAGAAACCATAAAAGTTAGAAACCTGAAAATTGGATTTTT
TTTCTGAGCAATCACAGCTTACAAATGTGGAAAATTTGTTAAAAGTTAGCCCCTCCAATTTTTCAATA
CAGAGAGGAGAAAGTGCCTAAAGTAGATGTACAATGTTTGGAAAAGTTTTTTGCATTATTTTACTATT
ACCAAAAGCAATTGAGTTTAAATCACAAAGCCTGTCTCCCTACCTCTTCACAGAAGAAACACTACAGA
ATGATCAAAATTTGGCCTTTCCAAAACCAAAATTCGTTAGAAAATCAGCAGGAGTCAAAGTACAGAGT
AAATAACTAAGTTTCATATAAGTTTCAGATACATTACTATCTACCACTTTCATCTCTTCATCTTCATT
GGCCTCATGTGGTAGAACATCATATTTAAAATTATACAAACTTGCTGGCTTGTTTACTAGTGTGGTTA
TTATAAGAAAAAAATGAGAAAATATAGATAAAACATCTGTCACATATTGCTTATAAACTAACAGTAAA
TATTACTTGTATTTTCCCCAATTAAAATAAAATTTACTGAGTTTTAGAACCAGAGCTAGTCAGATGCC
TTTTTTTCATAAATTTCTTCATAAATACCTCTGAGATTGTGGTCCTTAAATCTAGAGAGACTAAGATG
ACAGAGAAAATAGACACTGAAGAAAGGGAAGAATATCTTAATGATTTACATTACTACCTATAAATTAA
AAATTGTTAACTTTATTATATTTGTATTTTTATTTAAAATAGTGCTATATTAAAGTCATTTATAATAC
AGGGGAATAGGAATACTAACCTGTAATCTGATGCTCTCCAAACTTGCCTAAATCATAAAAGTTAATTA
GATAATTTATTTAAAATGCAAGATTTGCAGCCCTTTCCACTACATATTCATTAGTTCTGGAGGGAGGC
AAAAAGGTTTGGTGATTCTTACGGACAGGCAGCTTAGGAGAAAAGCTGATTTAGCTCGTCTACTTCAC
CTTTTCATTTGACAGGTGAGAAATCTCAGGGGTACAATGAAGTTAAATAAGTAATATCTCTTAAATCG
GTTCTGTGCTTTTTCTGTTTTTAAAATAAATATACCTTAATTTTGACGTCACACAGAATGATATTATA
AGTATAAATAGTTATCTATCTTTTAAATACATTGTCGTAATTCAGAATAACATTTCTTACTCAAGGCA
TTCAGACAGTGGTTTAAGTAATCCGAGGTACTCCGGAATGTCTCCATTTGAGCCTTTAAATGAAGAAA
ATCTATAGTCAAGATTTTCATTTGAAATATTTTTGATATCTAAGAATGAAACATATTTCCTGTTAAAT
TGTTTTCTATAAACCCTTATACAGTAACATCTTTTTTATTTCTAAAAGTGTTTTGGCTGGTCTCACAA
TTGTACTTTACTTTGTATTATGTAAAAGGAATACACAACGCTGAAGAACCCTGATACTAAGGGATATT
TGTTCTTACAG
SEQ ID NO: 129
AAV portion including U6-g7 expression cassette and Ex52 donor:
U6 PROMOTER, [symbol] PAM (ATTCCT), SaCas9 gRNA SCAFFOLD, donor
sequence, exon52
AGGGCCTATTTCCCATGATTCCTTCATATTTGCATATACGATACAAGGCTGTTAGAGAGATA
ATTGGAATTAATTTGACTGTAAACACAAAGATATTAGTACAAAATACGTGACGTAGAAAGTA
ATAATTTTCTTGGGTAGTTTGCAGTTTTAAAATTATGTTTTAAAATGGACTATCATATGCTTA
CCGTAACTTGAAAGTATTTCGATTTCTTGGCTTTATATATCTTGTGGAAAGGACGAAACACC
G [symbol] GTTTTAGTACTCTGGAAACAGAATCTACTAAAACAAGGCA
AAATGCCGTGTTTATCTCGTCAACTTGTTGGCGAGATTTTTTTCTAGACCCAGCTTTCTTGT
ACAAAGTTGGCGTTTAAAC [symbol] gttaatttgcgttcta
gccaccgagatacagtaacatcttttttatttctaaaagtgttttggctggtctcacaattg
tactttactttgtattatgtaaaaggaatacacaacgctgaagaaccctgatactaagggat
atttgttcttacaggcaacaatgcaggatttggaacagaggcgtccccagttggaagaactc
attaccgctgcccaaaatttgaaaaacaagaccagcaatcaagaggctagaacaatcattac
ggatcgaagtaagttttttaacaagcatgggacacacaaagcaagatgcatgacaagtttca
ataaaaacttaagttcatatatccccctcacatttataaaaataatgtgaaataattgtaaa
tgataacaattgtgctgagattttcagtccataatgttaccttttaataaatgaatgtaatt
ccattgaatagaagaaatac [symbol]
SEQ ID NO: 130
AAV portion including U6-g7 expression cassette and Superexon donor:
U6 PROMOTER, [symbol] PAM (ATTCCT), SaCas9 gRNA SCAFFOLD, donor
sequence, exon52-79 cDNA coding sequence, [symbol]
AGGGCCTATTTCCCATGATTCCTTCATATTTGCATATACGATACAAGGCTGTTAGAGAGATA
ATTGGAATTAATTTGACTGTAAACACAAAGATATTAGTACAAAATACGTGACGTAGAAAGTA
ATAATTTGTTGGGTAGTTTGGAGTTTTAAAATTATGTTTTAAAATGGAGTATCATATGGTTA
CCGTAACTTGAAAGTATTTCGATTTCTTGGCTTTATATATCTTGTGGAAAGGACGAAACACC
G [symbol] GTTTTAGTACTCTGGAAACAGAATCTACTAAAACAAGGCA
AAATGCCGTGTTTATCTCGTCAACTTGTTGGCGAGATTTTTTTCTAGACCCAGCTTTCTTGT
ACAAAGTTGGCGTTTAAAC [symbol] gttaatttgcgttcta
gccaccgagatacagtaacatcttttttatttctaaaagtgttttggctggtctcacaattg
tactttactttgtattatgtaaaaggaatacacaacgctgaagaaccctgatactaagggat
atttgttcttacaggcaacaatgcaggatttggaacagaggcgtccccagttggaagaactc
attaccgctgcccaaaatttgaaaaacaagaccagcaatcaagaggctagaacaatcattac
ggatcgaattgaaagaattcagaatcagtgggatgaagtacaagaacaccttcagaaccgga
ggcaacagttgaatgaaatgttaaaggattcaacacaatggctggaagctaaggaagaagct
gagcaggtcttaggacaggccagagccaagcttgagtcatggaaggagggtccctatacagt
agatgcaatccaaaagaaaatcacagaaaccaagcagttggccaaagacctccgccagtggc
agacaaatgtagatgtcgcaaatgacttggccctgaaacttctccgggattattctgcagat
gataccagaaaagtccacatgataacagagaatatcaatgcctcttggagaagcattcataa
aagggtgagtgagcgagaggctgctttggaagaaactcatagattactgcaacagttccccc
tggacctggaaaagtttcttgcctggcttacagaagctgaaacaactgccaatgtcctacag
gatgctacccgtaaggaaaggctcctagaagactccaagggagtaaaagagctgatgaaaca
atggcaagacctccaaggtgaaattgaagctcacacagatctttatcacaacctggatgaaa
acagccaaaaaatcctgagatccctggaaggttccgatgatgcagtcctgttacaaagacgt
ttggataacatgaacttcaagtggagtgaacttcggaaaaagtctctcaacattaggtccca
tttggaagccagttctgaccagtggaagcgtctgcacctttctctgcaggaacttctggtgt
ggctacagctgaaagatgatgaattaagccggcaggcacctattggaggcgactttccagca
gttcagaagcagaacgatgtacatagggccttcaagagggaattgaaaactaaagaacctgt
aatcatgagtactcttgagactgtacgaatatttctgacagagcagcctttggaaggactag
agaaactctaccaggagcccagagagctgcctcctgaggagagagcccagaatgtcactcgg
cttctacgaaagcaggctgaggaggtcaatactgagtgcgaaaaattgaacctgcactccgc
tcactggcagagaaaaatagatgagacccttgaaagactccaggaacttcaagaggccacgg
atgagctggacctcaagctgcgccaagctgaggtgatcaagggatcctggcagcccgtgggc
gatctcctcattgactctctccaagatcacctcgagaaagtcaaggcacttcgaggagaaat
tgcgcctctgaaagagaacgtgagccacgtcaatgaccttgctcgccagcttaccactttgg
gcattcagctctcaccgtataacctcagcactctggaagacctgaacaccagatggaagctt
ctgcaggtggccgtcgaggaccgagtcaggcagctgcatgaagcccacagggactttggtcc
agcatctcagcactttctttccacgtctgtccagggtccctgggagagagccatctcgccaa
acaaagtgccctactatatcaaccacgagactcaaacaacttgctgggaccatcccaaaatg
acagagctctaccagtctttagctgacctgaataatgtcagattctcagcttataggactgc
catgaaactccgaagactgcagaaggccctttgcttggatctcttgagcctgtcagctgcat
gtgatgccttggaccagcacaacctcaagcaaaatgaccagcccatggatatcctgcagatt
attaattgtttgaccactatttatgaccgcctggagcaagagcacaacaatttggtcaacgt
ccctctctgcgtggatatgtgtctgaactggctgctgaatgtttatgatacgggacgaacag
ggaggatccgtgtcctgtcttttaaaactggcatcatttccctgtgtaaagcacatttggaa
gacaagtacagataccttttcaagcaagtggcaagttcaacaggattttgtgaccagcgcag
gctgggcctccttctgcatgattctatccaaattccaagacagttgggtgaagttgcatcct
ttgggggcagtaacattgagccaagtgtccggagctgcttccaatttgctaataataagcca
gagatcgaagcggccctcttcctagactggatgagactggaaccccagtccatggtgtggct
gcccgtcctgcacagagtggctgctgcagaaactgccaagcatcaggccaaatgtaacatct
gcaaagagtgtccaatcattggattcaggtacaggagtctaaagcactttaattatgacatc
tgccaaagctgctttttttctggtcgagttgcaaaaggccataaaatgcactatcccatggt
ggaatattgcactccgactacatcaggagaagatgttcgagactttgccaaggtactaaaaa
acaaatttcgaaccaaaaggtattttgcgaagcatccccgaatgggctacctgccagtgcag
actgtcttagagggggacaacatcgaaactcccgttactctgatcaacttctggccagtaga
ttctgcgcctgcctcgtcccctcagctttcacacgatgatactcattcacgcattgaacatt
atgctagcaggctagcagaaatggaaaacagcaatggatcttatctaaatgatagcatctct
cctaatgagagcatagatgatgaacatttgttaatccagcattactgccaaagtttgaacca
ggactcccccctgagccagcctcgtagtcctgcccagatcttgatttccttagagagtgaag
aaagaggggagctagagagaatcctagcagatcttgaggaagaaaacaggaatctgcaagca
gaatatgaccgtctaaagcagcagcacgaacataaaggcctgtccccactgccgtcccctcc
tgaaatgatgcccacctctccccagagtccccgggatgctgagctcattgctgaggccaagc
tactgcgtcaacacaaaggccgcctggaagccaggatgcaaatcctggaagaccacaataaa
cagctggagtcacagttacacaggctaaggcagctgctggagcaaccccaggcagaggccaa
agtgaatggcacaacggtgtcctctccttctacctctctacagaggtccgacagcagtcagc
ctatgctgctccgagtggttggcagtcaaacttcggactccatgggtgaggaagatcttctc
agtcctccccaggacacaagcacagggttagaggaggtgatggagcaactcaacaactcctt
ccctagttcaagaggaagaaatacccctggaaagccaatgagagaggacacaatg [symbol] [symbol]
tcagcctcga

[symbol]

[symbol]

[symbol]

[symbol]

[symbol]

[symbol]

gtaagttttttaacaagcatgggacacacaaagcaagatgca
tgacaagtttcaataaaaacttaagttcatatatccccctcacatttataaaaataatgtga
aataattgtaaatgataacaattgtgctgagattttcagtccataatgttaccttttaataa
atgaatgtaattccattgaatagaagaaatac [symbol]
SEQ ID NO: 131
Streptccoccus pyogenes Cas9 (with D10A)
MDKKYSTGLAIGTNSVGWAVITDEYKVPSKKFKVLGNTDRHSIKKNLIGALLFDSGETAEATRLKRTA
RRRYTRRKNRICYLQEIFSNEMAKVDDSFFHRLEESFLVEEDKKHERHPIFGNIVDEVAYHEKYPTIY
HLRKKLVDSTDKADLRLIYLALAHMIKFRGHFLIEGDLNPDNSDVDKLFIQLVQTYNQLFEENPINAS
GVDAKAILSARLSKSRELENLIAQLPGEKKNGLFGNLIALSLGLTPNFKSNFDLAEDAKLQLSKDTYD
DDLDNLLAQIGDQYADLFLAAKNLSDAILLSDILRVNTEITKAPLSASMIKRYDEHHQDLTLLKALVR
QQLPEKYKEIFFDQSKNGYAGYIDGGASQEEFYKFIKPILEKMDGTEELLVKLNREDLLRKQRTFDNG
SIPHQIHLGELHAILRRQEDFYPFLKDNREKIEKILTFRIPYYVGPLARGNSRFAWMTRKSEETITPW
NFEEVVDKGASAQSFIERMTNFDKNLPNEKVLPKHSLLYEYETVYNELTKVKYVTEGMRKPAFLSGEQ
KKAIVDLLFKTNRKVTVKQLKEDYFKKIECFDSVEISGVEDRFNASLGTYHDLLKIIKDKDFLDNEEN
EDILEDIVLTLTLFEDREMIEERLKTYAHLEDDKVMKQLKERRYTGWGRLSRKLINGIRDKQSGKTIL
DFLKSDGFANRNFMQLIHDDSLTFKEDIQKAQVSGQGDSLHEHIANLAGSPAIKKGILQTVKVVDELV
KVMGRHKPENIVIEMARENQTTQKGQKNSRERMKRIEEGIKELGSQILKEHPVENTQLQNEKLYLYYL
QNGRDMYVDQELDINRLSDYDVDHIVPQSFLKDDSIDNKVLTRSDKNRGKSDNVPSEEVVKKMKNYWR
QLLNAKLITQRKFDNLTKAERGGLSELDKAGFIKRQLVETRQITKHVAQILDSRMNTKYDENDKLIRE
VKVITLKSKLVSDFRKDFQFYKVREINNYHHAHDAYLNAVVGTALIKKYPKLESEFVYGDYKVYDVRK
MIAKSEQEIGKATAKYFFYSNIMNFFKTEITLANGEIRKRPLIETNGETGEIVWDKGRDFATVRKVLS
MPQVNIVKKTEVQTGGFSKESILPKRNSDKLIARKKDWDPKKYGGFDSPTVAYSVLVVAKVEKGKSKK
LKSVKELLGITIMERSSFEKNPIDFLEAKGYKEVKKDLIIKLPKYSLFELENGRKRMLASAGELQKGN
AYNKHRDKPIREQAENIIHLFTLTNLGAPAAFKYFDTTIDRKRYTSTKEVLDATLIHQSITGLYETRI
DLSQLGGD
SEQ ID NO: 132
Streptccoccus pyogenes Cas9 (with D10A, H849A)
MDKKYSTGLAiGTNSVGWAVITDEYKVPSKKFKVLGNTDRHSIKKNLIGALLFDSGETAEATRLKRTA
RRRYTRRKNRTCYLQEIFSNEMAKVDDSFFHRLEESFLVEEDKKHERHPIFGNIVDEVAYHEKYPTIY
HLRKKLVDSTDKADLRLIYLALAHMIKFRGHFLIEGDLNPDNSDVDKLFIQLVQTYNQLFEENPINAS
GVDAKAILSARLSKSRRLENLIAQLPGEKKNGLFGNLIALSLGLTPNFKSNFDLAEDAKLQLSKDTYD
DDLDNLLAQIGDQYADLFLAAKNLSDAILLSDILRVNTEITKAPLSASMIKRYDEHHQDLTLLKALVR
QQLPEKYKEIFFDQSKNGYAGYIDGGASQEEFYKFIKPILEKMDGTEELLVKLNREDLLRKQRTFDNG
SIPHQIHLGELHAILRRQEDFYPFLKDNREKIEKILTFRIPYYVGPLARGNSRFAWMTRKSEETITPW
NFEEVVDKGASAQSFIERMTNFDKNLPNEKVLPKHSLLYEYFTVYNELTKVKYVTEGMRKPAFLSGEQ
KKAIVDLLFKTNRKVTVKQLKEDYFKKIECFDSVEISGVEDRFNASLGTYHDLLKIIKDKDFLDHEEN
EDILEDIVLTLTLFEDREMIEERLKTYAHLFDDKVMKOLKRRRYTGWGRLSRKLINGIRDKQSGKTIL
DFLKSDGFANRNFMQLIHDDSLTFKEDIQKAQVSGQGDSLHEHIANLAGSPAIKKGILQTVKVVDELV
KVMGRHKPENIVIEMARENQTTQKGQKNSRERMKRIEEGIKELGSQILKEHPVENTQLQNEKLYLYYL
QNGRDMYVDQELDINRLSDYDVDAIVPQSFLKDDSIDNKVLTRSDKNRGKSDNVPSEEVVKKMKNYWR
QLLNAKLITQRKFDNLTKAERGGLSELDKAGFIKRQLVETRQITKHVAQILDSRMNTKYDENDKLIRE
VKVITLKSKLVSDFRKDFQFYKVREINNYHHAHDAYLNAVVGTALIKKYPKLESEFVYGDYKVYDVRK
MIAKSEQEIGKATAKYFFYSNIMNFFKTEITLANGEIRKRPLIETNGETGEIVWDKGRDFATVRKVLS
MPQVNIVKKTEVQTGGFSKESILPKRNSDKLIARKKDWDPKKYGGFDSPTVAYSVLVVAKVEKGKSKK
LKSVKELLGITIMERSSFEKNPIDFLEAKGYKEVKKDLIIKLPKYSLFELENGRKRMLASAGELQKGN
ELALPSKYVNFLYLASHYEKLKGSPEDNEQKQLFVEQHKHYLDEIIEQISEFSKRVILADANLDKVLS
AYNKHRDKPIREQAENIIHLFTLTNLGAPAAFKYFDTTTDRKRYTSTKEVLDATLIHQSITGLYETRI
DLSQLGGD
SEQ ID NO: 133
Polynucleotide sequence of D10A mutant of Staphylococcus aureus Cas9
atgaaaagga actacattct ggggctggcc atcgggatta caagcgtggg gtatgggatt
attgactatg aaacaaggga cgtgatcgac gcaggcgtca gactgttcaa ggaggccaac
gtggaaaaca atgagggacg gagaagcaag aggggagcca ggcgcctgaa acgacggaga
aggcacagaa tccagagggt gaagaaactg ctgttcgatt acaacctgct gaccgaccat
tctgagctga gtggaattaa tccttatgaa gccagggtga aaggcctgag tcagaagctg
tcagaggaag agttttccgc agctctgctg cacctggcta agcgccgagg agtgcataac
gtcaatgagg tggaagagga caccggcaac gagctgtcta caaaggaaca gatctcacgc
aatagcaaag ctctggaaga gaagtatgtc gcagagctgo agctggaacg gctgaagaaa
gatggcgagg tgagagggtc aattaatagg ttcaagacaa gcgactacgt caaagaagcc
aagcagctgc tgaaagtgca gaaggcttac caccagctgg atcagagctt catcgatact
tatatcgacc tgctggagac tcggagaacc tactatgagg gaccaggaga agggagcccc
ttcggatgga aagacatcaa ggaatggtac gagatgctga tgggacattg cacctatttt
ccagaagagc tgagaagcgt caagtacgct tataacgcag atctgtacaa cgccctgaat
gacctgaaca acctggtcat caccagggat gaaaacgaga aactggaata ctatgagaag
ttccagatca tcgaaaacgt gtttaagcag aagaaaaagc ctacactgaa acagattgct
aaggagatcc tcgtcaacga agaggacatc aagggctacc gggtgacaag cactggaaaa
ccagagttca ccaatctgaa agtgtatcac gatattaagg acatcacagc acggaaagaa
atcattgaga acgccgaact gctggatcag attgctaaga tcctgactat ctaccagagc
tccgaggaca tccaggaaga gctgactaac ctgaacagcg agctgaccca ggaagagatc
gaacagatta gtaatctgaa ggggtacacc ggaacacaca acctgtccct gaaagctatc
aatctgattc tggatgagct gtggcataca aacgacaatc agattgcaat ctttaaccgg
ctgaagctgg tcccaaaaaa ggtggacctg agtcagcaga aagagatccc aaccacactg
gtggacgatt tcattctgtc acccgtggtc aagcggagct tcatccagag catcaaagtg
atcaacgcca tcatcaagaa gtacggcctg cccaatgata tcattatcga gctggctagg
gagaagaaca gcaaggacgc acagaagatg atcaatgaga tgcagaaacg aaaccggcag
accaatgaac gcattgaaga gattatccga actaccggga aagagaacgc aaagtacctg
attgaaaaaa tcaagctgca cgatatgcag gagggaaagt gtctgtattc tctggaggcc
atccccctgg aggacctgct gaacaatcca ttcaactacg aggtcgatca tattatcccc
agaagcgtgt ccttcgacaa ttcctttaac aacaaggtgc tggtcaagca ggaagagaac
tctaaaaagg gcaataggac tcctttccag tacctgtcta gttcagattc caagatctct
tacgaaacct ttaaaaagca cattctgaat ctggccaaag gaaagggccg catcagcaag
accaaaaagg agtacctgct ggaagagcgg gacatcaaca gattctccgt ccagaaggat
tttattaacc ggaatctggt ggacacaaga tacgctacto gcggcctgat gaatctgctg
cgatcctatt tccgggtgaa caatctggat gtgaaagtca agtccatcaa cggcgggttc
acatcttttc tgaggcgcaa atggaagttt aaaaaggagc gcaacaaagg gtacaagcac
catgccgaag atgctctgat tatcgcaaat gccgacttca tctttaagga gtggaaaaag
ctggacaaag ccaagaaagt gatggagaac cagatgttcg aagagaagca ggccgaatct
atgcccgaaa tcgagacaga acaggagtac aaggagattt tcatcactcc tcaccagatc
aagcatatca aggatttcaa ggactacaag tactctcacc gggtggataa aaagcccaac
agagagctga tcaatgacac cctgtatagt acaagaaaag acgataaggg gaataccctg
attgtgaaca atctgaacgg actgtacgac aaagataatg acaagctgaa aaagctgatc
aacaaaagtc ccgagaagct gctgatgtac caccatgatc ctcagacata tcagaaactg
aagctgatta tggagcagta cggcgacgag aagaacccac tgtataagta ctatgaagag
actgggaact acctgaccaa gtatagcaaa aaggataatg gccccgtgat caagaagatc
aagtactatg ggaacaagct gaatgcccat ctggacatca cagacgatta ccctaacagt
cgcaacaagg tggtcaagct gtcactgaag ccatacagat tcgatgtcta tctggacaac
ggcgtgtata aatttgtgac tgtcaagaat ctggatgtca tcaaaaagga gaactactat
gaagtgaata gcaagtgcta cgaagaggct aaaaagctga aaaagattag caaccaggca
gagttcatcg cctcctttta caacaacgac ctgattaaga tcaatggcga actgtatagg
gtcatcgggg tgaacaatga tctgctgaac cgcattgaag tgaatatgat tgacatcact
taccgagagt atctggaaaa catgaatgat aagcgccccc ctcgaattat caaaacaatt
gcctctaaga ctcagagtat caaaaagtac tcaaccgaca ttctgggaaa cctgtatgag
gtgaagagca aaaagcaccc tcagattatc aaaaagggc
SEQ ID NO: 134
Polynucleotide sequence of N580A mutant of Staphylococcus aureus Cas9
atgaaaagga actacattct ggggctggac atcgggatta caagcgtggg gtatgggatt
attgactatg aaacaaggga cgtgatcgac gcaggcgtca gactgttcaa ggaggccaac
gtggaaaaca atgagggacg gagaagcaag aggggagcca ggcgcctgaa acgacggaga
aggcacagaa tccagagggt gaagaaactg ctgttcgatt acaacctgct gaccgaccat
tctgagctga gtggaattaa tccttatgaa gccagggtga aaggcctgag tcagaagctg
tcagaggaag agttttccgc agctctgctg cacctggcta agcgccgagg agtgcataac
gtcaatgagg tggaagagga caccggcaac gagctgtcta caaaggaaca gatctcacgc
aatagcaaag ctctggaaga gaagtatgtc gcagagctgc agctggaacg gctgaagaaa
gatggcgagg tgagagggtc aattaatagg ttcaagacaa gcgactacgt caaagaagcc
aagcagctgc tgaaagtgca gaaggcttac caccagctgg atcagagctt catcgatact
tatatcgacc tgctggagac tcggagaacc tactatgagg gaccaggaga agggagcccc
ttcggatgga aagacatcaa ggaatggtac gagatgctga tgggacattg cacctatttt
ccagaagagc tgagaagcgt caagtacgct tataacgcag atctgtacaa cgccctgaat
gacctgaaca acctggtcat caccagggat gaaaacgaga aactggaata ctatgagaag
ttccagatca tcgaaaacgt gtttaagcag aagaaaaagc ctacactgaa acagattgct
aaggagatcc tggtcaacga agaggacatc aagggctacc gggtgacaag cactggaaaa
ccagagttca ccaatctgaa agtgtatcac gatattaagg acatcacagc acggaaagaa
atcattgaga acgccgaact gctggatcag attgctaaga tcctgactat ctaccagagc
tccgaggaca tccaggaaga gctgactaac ctgaacagcg agctgaccca ggaagagatc
gaacagatta gtaatctgaa ggggtacacc ggaacacaca acctgtccct gaaagctatc
aatctgattc tggatgagct gtggcataca aacgacaatc agattgcaat ctttaaccgg
ctgaagctgg tcccaaaaaa ggtggacctg agtcagcaga aagagatccc aaccacactg
gtggacgatt tcattctgtc acccgtggtc aagcggagct tcatccagag catcaaagtg
atcaacgcca tcatcaagaa gtacggcctg cccaatgata tcattatcga gctggctagg
gagaagaaca gcaaggacgc acagaagatg atcaatgaga tgcagaaacg aaaccggcag
accaatgaac gcattgaaga gattatccga actaccggga aagagaacgc aaagtacctg
attgaaaaaa tcaagctgca cgatatgcag gagggaaagt gtctgtattc tctggaggcc
atccccctgg aggacctgct gaacaatcca ttcaactacg aggtcgatca tattatcccc
agaagcgtgt ccttcgacaa ttcctttaac aacaaggtgc tggtcaagca ggaagaggcc
tctaaaaagg gcaataggac tcctttccag tacctgtcta gttcagattc caagatctct
tacgaaacct ttaaaaagca cattctgaat ctggccaaag gaaagggccg catcagcaag
accaaaaagg agtacctgct ggaagagcgg gacatcaaca gattctccgt ccagaaggat
tttattaacc ggaatctggt ggacacaaga tacgctactc gcggcctgat gaatctgctg
cgatcctatt tccgggtgaa caatctggat gtgaaagtca agtccatcaa cggcgggttc
acatcttttc tgaggcgcaa atggaagttt aaaaaggagc gcaacaaagg gtacaagcac
catgccgaag atgctctgat tatcgcaaat gccgacttca tctttaagga gtggaaaaag
ctggacaaag ccaagaaagt gatggagaac cagatgttcg aagagaagca ggccgaatct
atgcccgaaa tcgagacaga acaggagtac aaggagattt tcatcactcc tcaccagatc
aagcatatca aggatttcaa ggactacaag tactctcacc gggtggataa aaagcccaac
agagagctga tcaatgacac cctgtatagt acaagaaaag acgataaggg gaataccctg
attgtgaaca atctgaacgg actgtacgac aaagataatg acaagctgaa aaagctgatc
aacaaaagtc ccgagaagct gctgatgtac caccatgatc ctcagacata tcagaaactg
aagctgatta tggagcagta cggcgacgag aagaacccac tgtataagta ctatgaagag
actgggaact acctgaccaa gtatagcaaa aaggataatg gccccgtgat caagaagatc
aagtactatg ggaacaagct gaatgcccat ctggacatca cagacgatta ccctaacagt
cgcaacaagg tggtcaagct gtcactgaag ccatacagat tcgatgtcta tctggacaac
ggcgtgtata aatttgtgac tgtcaagaat ctggatgtca tcaaaaagga gaactactat
gaagtgaata gcaagtgcta cgaagaggct aaaaagctga aaaagattag caaccaggca
gagttcatcg cctcctttta caacaacgac ctgattaaga tcaatggcga actgtatagg
gtcatcgggg tgaacaatga tctgctgaac cgcattgaag tgaatatgat tgacatcact
taccgagagt atctggaaaa catgaatgat aagcgccccc ctcgaattat caaaacaatt
gcctctaaga ctcagagtat caaaaagtac tcaaccgaca ttctgggaaa cctgtatgag
gtgaagagca aaaagcaccc tcagattatc aaaaagggc
SEQ ID NO: 135
GS linker (Gly-Gly-Gly-Gly-Ser)ₙ, wherein ₙ is an integer between 0 and 10
SEQ ID NO: 136
Gly-Gly-Gly-Gly-Gly
SEQ ID NO: 137
Gly-Gly-Ala-Gly-Gly
SEQ ID NO: 138
Gly-Gly-Gly-Gly-Ser-Ser-Ser
SEQ ID NO: 139
Gly-Gly-Gly-Gly-Ala-Ala-Ala
SEQ ID NO: 140
Human p300 (with L553M mutation) protein
MAENVVEPGPPSAKRPKLSSPALSASASDGTDFGSLFDLEHDLPDELINSTELGLTNGGDINQLQTSL
GMVQDAASKHKQLSELLRSGSSPNLNMGVGGPGQVMASQAQQSSPGLGLINSMVKSPMTQAGLTSPNM
GMGTSGPNQGPTQSTGMMNSPVNQPAMGMNTGMNAGMNPGMLAAGNGQGIMPNQVMNGSIGAGRGRQN
MQYPNPGMGSAGNLLTEPLQQGSPQMGGQTGLRGPQPLKMGMMNNPNPYGSPYTQNPGQQIGASGLGL
QIQTKTVLSNNLSPFAMDKKAVPGGGMPNMGQQPAPQVQQPGLVTPVAQGMGSGAHTADPEKRKLIQQ
QLVLLLHAHKCORREQANGEVRQCNLPHCRTMKNVLNHMTHCQSGKSCQVAHCASSRQIISHWKNCTR
HDCPVCLPLKNAGDKRNQQPILTGAPVGLGNPSSLGVGQQSAPNLSTVSQIDPSSIERAYAALGLPYQ
VNQMPTOPQVQAKNQQNQQPGQSPQGMRPMSNMSASPMGVNGGVGVQTPSLLSDSMLHSAINSQNPMM
SENASVPSMGPMPTAAQPSTTGIRKQWHEDITQDLRNHLVHKLVQAIFPTPDPAALKDRRMENLVAYA
RKVEGDMYESANNRAEYYHLLAEKIYKIQKELEEKRRTRLQKQNMLPNAAGMVPVSMNPGPNMGQPQP
GMTSNGPLPDPSMIRGSVPNQMMPRITPQSGLNQFGQMSMAQPPIVPRQTPPLQHHGQLAQPGALNPP
MGYGPRMQQPSNOGQFLPQTQFPSQGMNVTNIPLAPSSGQAPVSQAQMSSSSCPVNSPIMPPGSQGSH
IHCPQLPQPALHQNSPSPVPSRTPTPHHTPPSTGAQQPPATTIPAPVPTPPAMPPGPQSQALHPPPRQ
TPTPPTTQLPQQVQPSLPAAPSADQPQQQPRSQQSTAASVPTPTAPLLPPQPATPLSQPAVSIEGQVS
NPPSTSSTEVNSQAIAEKQPSQEVKMEAKMEVDQPEPADTQPEDISESKVEDCKMESTETEERSTELK
TEIKEEEDQPSTSATQSSPAPGQSKKKIFKPEELRQALMPTLEALYRQDPESLPFRQPVDPQLLGIPD
YFDIVKSPMDLSTIKRKLDTGQYQEPWQYVDDIWLMFNNAWLYNRKTSRVYKYCSKLSEVFEQEIDPV
MQSLGYCCGRKLEFSPQTLCCYGKQLCTIPRDATYYSYQNRYHFCEKCFNEIQGESVSLGDDPSQPQT
TTNKEQFSKRKNDTLDPELFVECTECGRKMHQICVLHHEIIWPAGFVCDGCLKKSARTRKENKFSAKR
LPSTRLGTFLENRVNDFLRRQNHPESGEVTVRVVHASDKTVEVKPGMKARFVDSGEMAESFPYRTKAL
FAFEEIDGVDLCFFGMHVQEYGSDCPPPNQRRVYISYLDSVHFFRPKCLRTAVYHEILTGYLEYVKKL
GYTTGHIWACPPSEGDDYIFHCHPPDQKIPKPKRLQEWYKKMLDKAVSERIVHDYKDIFKQATEDRLT
SAKELPYFEGDFWPNVLEESIKELEQEEEERKREENTSNESTDVTKGDSKNAKKKNNKKTSKNKSSLS
RGNKKKPGMPNVSNDLSQKLYATMEKHKEVFFVIRLIAGPAANSLPPIVDPDPLIPCDLMDGRDAFLT
LARDKHLEFSSLRRAQWSTMCMLVELHTQSQDRFVYTCNECKHHVETRWHCTVCEDYDLCITCYNTKN
HDHKMEKLGLGLDDESNNQQAAATQSPGDSRRLSIQRCIQSLVHACQCRNANCSLPSCQKMKRVVQHT
KGCKRKTNGGCPICKQLIALCCYHAKHCQENKCPVPFCLNIKQKLRQQQLQHRLQQAQMLRRRMASMQ
RTGVVGQQQGLPSPTPATPTTPTGQQPTTPQTPQPTSQPQPTPPNSMPPYLPRTQAAGPVSQGKAAGQ
VTPPTPPQTAQPPLPGPPPAAVEMAMQIQRAAETQRQMAHVQIFQRPIQHQMPPMTPMAPMGMNPPPM
TRGPSGHLEPGMGPTGMQQQPPWSQGGLPQPQQLQSGMPRPAMMSVAQHGQPLNMAPQPGLGQVGISP
LKPGTVSQQALQNLLRTLRSPSSPLQQQQVLSILHANPQLLAAFIKQRAAKYANSNPQPIPGQPGMPQ
GQPGLQPPTMPGQQGVHSNPAMQNMNPMQAGVQRAGLPQQQPQQQLQPPMGGMSPQAQQMNMNHNTMP
SQFRDILRRQQMMQQQQQQGAGPGIGPGMANHNQFQQPQGVGYPPQQQQRMQHHMQQMQQGNMGQIGQ
LPQALGAEAGASLQAYQQRLLQQQMGSPVQPNPMSPQQHMLPNQAQSPHLQGQQIPNSLSNQVRSPQP
VPSPRPQSOPPHSSPSPRMQPQPSPHHVSPQTSSPHPGLVAAQANPMEQGHFASPDQNSMLSQLASNP
GMANLHGASATDLGLSTDNSDLNSNLSQSTLDIH
SEQ ID NO: 141
Human p300 Core Effector protein (aa 1048-1664 of SEQ ID NO: 140)
IFKPEELRQALMPTLEALYRQDPESLPFRQPVDPQLLGIPDYFDIVKSPMDLSTIKRKLDTGQYQEPW
QYVDDIWLMFNNAWLYNRKTSRVYKYCSKLSEVFEQEIDPVMQSLGYCCGRKLEFSPQTLCCYGKQLC
TIPRDATYYSYQNRYHFCEKCFNEIQGESVSLGDDPSQPQTTINKEQFSKRKNDTLDPELFVECTECG
RKMHQICVLHHEIIWPAGFVCDGCLKKSARTRKENKFSAKRLPSTRLGTFLENRVNDFLRRQNHPESG
EVTVRVVHASDKTVEVKPGMKARFVDSGEMAESFPYRTKALFAFEEIDGVDLCFFGMHVQEYGSDCPP
PNQRRVYISYLDSVHFFRPKCLRTAVYHEILIGYLEYVKKLGYTTGHIWACPPSEGDDYIFHCHPPDQ
KIPKPKRLQEWYKKMLDKAVSERIVHDYKDIFKQATEDRLTSAKELPYFEGDFWPNVLEESIKELEQE
EEERKREENTSNESTDVTKGDSKNAKKKNNKKTSKNKSSLSRGNKKKPGMPNVSNDLSQKLYATMEKH
KEVFFVIRLIAGPAANSLPPIVDPDPLIPCDLMDGRDAFLTLARDKHLEFSSLRRAQWSTMCMLVELH
TQSQD
SEQ ID NO: 142
VP64-dCas9-VP64 protein
RADALDDFDLDMLGSDALDDFDLDMLGSDALDDFDLDMLGSDALDDFDLDMVNPKKKRKVGRGMDKKY
SIGLAIGTNSVGWAVITDEYKVPSKKFKVLGNTDRHSIKKNLIGALLFDSGETAEATRLKRTARRRYT
RRKNRICYLQEIFSNEMAKVDDSFFHRLEESFLVEEDKKHERHPIFGNIVDEVAYHEKYPTIYHLRKK
LVDSTDKADLRLIYLALAHMIKFRGHFLIEGDLNPDNSDVDKLFIQLVQTYNQLFEENPINASGVDAK
AILSARLSKSRRLENLIAQLPGEKKNGLFGNLIALSLGLTPNFKSNFDLAEDAKLQLSKDTYDDDLDN
LLAQIGDQYADLFLAAKNLSDAILLSDILRVNTEITKAPLSASMIKRYDEHHQDLTLLKALVRQQLPE
KYKEIFFDQSKNGYAGYIDGGASQEEFYKFIKPILEKMDGTEELLVKLNREDLLRKQRTFDNGSIPHQ
IHLGELHAILRRQEDFYPFLKDNREKIEKILTFRIPYYVGPLARGNSRFAWMTRKSEETITPWNFEEV
VDKGASAQSFIERMTNFDKNLPNEKVLPKHSLLYEYFTVYNELTKVKYVTEGMRKPAFLSGEQKKAIV
DLLFKTNRKVTVKQLKEDYFKKIECFDSVEISGVEDRFNASLGTYHDLLKIIKDKDFLDNEENEDILE
DIVLTLTLFEDREMIEERLKTYAHLFDDKVMKQLKRRRYTGWGRLSRKLINGIRDKQSGKTILDFLKS
DGFANRNFMQLIHDDSLTFKEDIQKAQVSGQGDSLHEHTANLAGSPAIKKGILQTVKVVDELVKVMGR
HKPENIVIEMARENQTTQKGQKNSRERMKRIEEGIKELGSQILKEHPVENTQLQNEKLYLYYLQNGRD
MYVDQELDINRLSDYDVDAIVPQSFLKDDSIDNKVLTRSDKNRGKSDNVPSEEVVKKMKNYWRQLLNA
KLITQRKFDNLTKAERGGLSELDKAGFIKRQLVETRQITKHVAQILDSRMNTKYDENDKLIREVKVIT
LKSKLVSDFRKDFQFYKVREINNYHHAHDAYLNAVVGTALIKKYPKLESEFVYGDYKVYDVRKMIAKS
EQEIGKATAKYFFYSNIMNFFKTEITLANGEIRKRPLIETNGETGEIVWDKGRDFATVRKVLSMPQVN
IVKKTEVQTGGFSKESILPKRNSDKLIARKKDWDPKKYGGFDSPTVAYSVLVVAKVEKGKSKKLKSVK
ELLGITIMERSSFEKNPIDFLEAKGYKEVKKDLIIKLPKYSLFELENGRKRMLASAGELQKGNELALP
SKYVNFLYLASHYEKLKGSPEDNEQKQLFVEQHKHYLDEIIEQISEFSKRVILADANLDKVLSAYNKH
RDKPIREQAENIIHLFTLTNLGAPAAFKYFDTTTDRKRYTSTKEVLDATLIHQSITGLYETRIDLSQL
GGDSRADPKKKRKVASRADALDDFDLDMLGSDALDDFDLDMLGSDALDDEDLDMLGSDALDDFDLDML
I
SEQ ID NO: 143
VP64-dCas9-VP64 DNA
cgggctgacgcattggacgattttgatctggatatgctgggaagtgacgccctcgatgattttgacct
tgacatgcttggttcggatgcccttgatgactttgacctcgacatgctcggcagtgacgcccttgatg
atttcgacctggacatggttaaccccaagaagaagaggaaggtgggccgcggaatggacaagaagtac
tccattgggctcgccatcggcacaaacagcgtcggctgggccgtcattacggacgagtacaaggtgcc
gagcaaaaaattcaaagttctgggcaataccgatcgccacagcataaagaagaacctcattggcgccc
tcctgttcgactccggggaaaccgccgaagccacgcggctcaaaagaacagcacggcgcagatatacc
cgcagaaagaatcggatctgctacctgcaggagatctttagtaatgagatggctaaggtggatgactc
tttcttccataggctggaggagtcctttttggtggaggaggataaaaagcacgagcgccacccaatct
ttggcaatatcgtggacgaggtggcgtaccatgaaaagtacccaaccatatatcatctgaggaagaag
cttgtagacagtactgataaggctgacttgcggttgatctatctcgcgctggcgcatatgatcaaatt
tcggggacacttcctcatcgagggggacctgaacccagacaacagcgatgtcgacaaactctttatcc
aactggttcagacttacaatcagcttttcgaagagaacccgatcaacgcatccggagttgacgccaaa
gcaatcctgagcgctaggctgtccaaatcccggcggctcgaaaacctcatcgcacagctccctgggga
gaagaagaacggcctgtttggtaatcttatcgccctgtcactcgggctgacccccaactttaaatcta
acttcgacctggccgaagatgccaagcttcaactgagcaaagacacctacgatgatgatctcgacaat
ctgctggcccagatcggcgaccagtacgcagacctttttttggcggcaaagaacctgtcagacgccat
tctgctgagtgatattctgcgagtgaacacggagatcaccaaagctccgctgagcgctagtatgatca
agcgctatgatgagcaccaccaagacttgactttgctgaaggcccttgtcagacagcaactgcctgag
aagtacaaggaaattttcttcgatcagtctaaaaatggctacgccggatacattgacggcggagcaag
ccaggaggaattttacaaatttattaagcccatcttggaaaaaatggacggcaccgaggagctgctgg
attcacctgggcgaactgcacgctatcctcaggcggcaagaggatttctacccctttttgaaagataa
cagggaaaagattgagaaaatcctcacatttcggataccctactatgtaggccccctcgcccggggaa
attccagattcgcgtggatgactcgcaaatcagaagagaccatcactccctggaacttcgaggaagtc
gtggataagggggcctctgcccagtccttcatcgaaaggatgactaactttgataaaaatctgcctaa
cgaaaaggtgcttcctaaacactctctgctgtacgagtacttcacagtttataacgagctcaccaagg
tcaaatacgtcacagaagggatgagaaagccagcattcctgtctggagagcagaagaaagctatcgtg
gacctcctcttcaagacgaaccggaaagttaccgtgaaacagctcaaagaagactatttcaaaaagat
tgaatgtttcgactctgttgaaatcagcggagtggaggatcgcttcaacgcatccctgggaacgtatc
acgatctcctgaaaatcattaaagacaaggacttcctggacaatgaggagaacgaggacattcttgag
gacattgtcctcacccttacgttgtttgaagatagggagatgattgaagaacgcttgaaaacttacgc
tcatctcttcgacgacaaagtcatgaaacagctcaagaggcgccgatatacaggatgggggcggctgt
caagaaaactgatcaatgggatccgagacaagcagagtggaaagacaatcctggattttcttaagtcc
gatggatttgccaaccggaacttcatgcagttgatccatgatgactctctcacctttaaggaggacat
ccagaaagcacaagtttctggccagggggacagtcttcacgagcacatcgctaatcttgcaggtagcc
cagctatcaaaaagggaatactgcagaccgttaaggtcgtggatgaactcgtcaaagtaatgggaagg
cataagcccgagaatatcgttatcgagatggcccgagagaaccaaactacccagaagggacagaagaa
cagtagggaaaggatgaagaggattgaagagggtataaaagaactggggtcccaaatccttaaggaac
acccagttgaaaacacccagcttcagaatgagaagctctacctgtactacctgcagaacggcagggac
atgtacgtggatcaggaactggacatcaatcggctctccgactacgacgtggatgccatcgtgcccca
gtcttttctcaaagatgattctattgataataaagtgttgacaagatccgataaaaatagagggaaga
gtgataacgtcccctcagaagaagttgtcaagaaaatgaaaaattattggcggcagctgctgaacgcc
aaactgatcacacaacggaagttcgataatctgactaaggctgaacgaggtggcctgtctgagttgga
taaagccggcttcatcaaaaggcagcttgttgagacacgccagatcaccaagcacgtggcccaaattc
tcgattcacgcatgaacaccaagtacgatgaaaatgacaaactgattcgagaggtgaaagttattact
ctgaagtctaagctggtctcagatttcagaaaggactttcagttttataaggtgagagagatcaacaa
ttaccaccatgcgcatgatgcctacctgaatgcagtggtaggcactgcacttatcaaaaaatatccca
agcttgaatctgaatttgtttacggagactataaagtgtacgatgttaggaaaatgatcgcaaagtct
gagcaggaaataggcaaggccaccgctaagtacttcttttacagcaatattatgaattttttcaagac
cgagattacactggccaatggagagattcggaagcgaccacttatcgaaacaaacggagaaacaggag
aaatcgtgtgggacaagggtagggatttcgcgacagtccggaaggtcctgtccatgccgcaggtgaac
atcgttaaaaagaccgaagtacagaccggaggcttctccaaggaaagtatcctcccgaaaaggaacag
cgacaagctgatcgcacgcaaaaaagattgggaccccaagaaatacggcggattcgattctcctacag
tcgcttacagtgtactggttgtggccaaagtggagaaagggaagtctaaaaaactcaaaagcgtcaag
gaactgctgggcatcacaatcatggagcgatcaagcttcgaaaaaaaccccatcgactttctcgaggc
gaaaggatataaagaggtcaaaaaagacctcatcattaagcttcccaagtactctctctttgagcttg
aaaacggccggaaacgaatgctcgctagtgcgggcgagctgcagaaaggtaacgagctggcactgccc
tctaaatacgttaatttcttgtatctggccagccactatgaaaagctcaaagggtctcccgaagataa
tgagcagaagcagctgttcgtggaacaacacaaacactaccttgatgagatcatcgagcaaataagcg
aattctccaaaagagtgatcctcgccgacgctaacctcgataaggtgctttctgcttacaataagcac
agggataagcccatcagggagcaggcagaaaacattatccacttgtttactctgaccaacttgggcgc
gcctgcagccttcaagtacttcgacaccaccatagacagaaagcggtacacctctacaaaggaggtcc
tggacgccacactgattcatcagtcaattacggggctctatgaaacaagaatcgacctctctcagctc
ggtggagacagcagggctgaccccaagaagaagaggaaggtggctagccgcgccgacgcgctggacga
tttcgatctcgacatgctgggttctgatgccctcgatgactttgacctggatatgttgggaagcgacg
cattggatgactttgatctggacatgctcggctccgatgctctggacgatttcgatctcgatatgtta
atc
SEQ ID NO: 144
Protein sequence for VPH
DALDDFDLDMLGSDALDDFDLDMLGSDALDDFDLDMLGSDALDDFDLDMLGSLPSASVEFEGSGGPSG
QISNQALALAPSSAPVLAQTMVPSSAMVPLAQPPAPAPVLTPGPPQSLSAPVPKSTQAGEGTLSEALL
HLQFDADEDLGALLGNSTDPGVFTDLASVDNSEFQQLLNQGVSMSHSTAEPMLMEYPEAITRLVTGSQ
RPPDPAPTPLGTSGLPNGLSGDEDFSSIADMDFSALLSQISSSGQGGGGSGFSVDTSALLDLFSPSVT
VPDKSLPDLDSSLASIQELLSPQEPPRPPEAENSSPDSGKQLVHYTAQPLFLLDPGSVDTGSNDLPVL
FELGEGSYFSEGDGFAEDPTISLLTGSEPPKAKDPTVS
SEQ ID NO: 145
DNA sequence for VPH
gatgctttagacgattttgacttagatatgcttggttcagacgcgttagacgacttcgacctagacat
gttaggctcagatgcattggacgacttcgatttagatatgttgggctccgatgccctagatgactttg
atctagatatgctagggtcactacccagcgccagcgtcgagttcgaaggcagcggcgggccttcaggg
cagatcagcaaccaggccctggctctggcccctagctccgctccagtgctggcccagactatggtgcc
ctctagtgctatggtgcctctggcccagccacctgctccagcccctgtgctgaccccaggaccacccc
agtcactgagcgccccagtgcccaagtctacacaggccggcgaggggactctgagtgaagctctgctg
cacctgcagttcgacgctgatgaggacctgggagctctgctggggaacagcaccgatcccggagtgtt
cacagatctggcctccgtggacaactctgagtttcagcagctgctgaatcagggcgtgtccatgtctc
atagtacagccgaaccaatgctgatggagtaccccgaagccattacccggctggtgaccggcagccag
cggccccccgaccccgctccaactcccctgggaaccagcggcctgcctaatgggctgtccggagatga
agacttctcaagcatcgctgatatggactttagtgccctgctgtcacagatttcctctagtgggcagg
gaggaggtggaagcggcttcagcgtggacaccagtgccctgctggacctgttcagcccctcggtgacc
gtgcccgacatgagcctgcctgaccttgacagcagcctggccagtatccaagagctcctgtctcccca
ggagccccccaggcctcccgaggcagagaacagcagcccggattcagggaagcagctggtgcactaca
cagcgcagccgctgttcctgctggaccccggctccgtggacaccgggagcaacgacctgccggtgctg
tttgagctgggagagggctcctacttctccgaaggggacggcttcgccgaggaccccaccatctccct
gcf.gacaggctcggagcctcccaaagccaaggaccccactgtctcc
SEQ ID NO: 146
Protein sequence for VPR
DALDDFDLDMLGSDALDDFDLDMLGSDALDDFDLDMLGSDALDDFDLDMLGSPKKKRKVGSQYLPDTD
DRHRIEEKRKRTYETFKSIMKKSPFSGPTDPRPPPRRIAVPSRSSASVPKPAPQPYPFTSSLSTINYD
EFPTMVFPSGQISQASALAPAPPQVLPQAPAPAPAPAMVSALAQAPAPVPVLAPGPPQAVAPPAPKPT
QAGEGTLSEALLQLQFDDEDLGALLGNSTDPAVFTDLASVDNSEFQQLLNQGIPVAPHTTEPMLMEYP
EAITRLVTGAQRPPDPAPAPLGAPGLPNGLLSGDEDFSSTADMDFSALLSQISSGSGSGSRDSREGMF
LPKPEAGSAISDVFEGREVCQPKRIRPFHPPGSPWANRPLPASLAPTPTGPVHEPVGSLTPAPVPQPL
DPAPAVTPEASHLLEDPDEETSQAVKALREMADTVIPQKEEAAICGQMDLSHPPPRGHLDELTTTLES
MTEDLNLDSPLTPELNEILDTELNDECLLHAMHISTGLSIFDTSLF
SEQ ID NO: 147
DNA sequence for VPR
gatgctttagacgattttgacttagatatgcttggttcagacgcgttagacgacttcgacctagacat
gttaggctcagatgcattggacgacttcgatttagatatgttgggctccgatgccctagatgactttg
atctagatatgctaggtagtcccaaaaagaagaggaaagtgggatcccagtatctgcccgacacagat
gatagacaccgaatcgaagagaaacgcaagcgaacgtatgaaaccttcaaatcgatcatgaagaaatc
gcccttctcgggtccgaccgatcccaggcccccaccgagaaggattgcggtcccgtcccgctcgtcgg
ccagcgtgccgaagcctgcgccgcagccctaccccttcacgtcgagcctgagcacaatcaattatgac
gagttcccgacgatggtgttcccctcgggacaaatctcacaagcctcggcgctcgcaccagcgcctcc
ccaagtccttccgcaagcgcctgccccagcgcctgcaccggcaatggtgtccgccctcgcacaggccc
ctgcgcccgtccccgtgctcgcgcctggaccgccccaggcggtcgctccaccggctccgaagccgacg
caggccggagagggaacactctccgaagcacttcttcaactccagtttgatgacgaggatcttggagc
actccttggaaactcgacagaccctgcggtgtttaccgacctcgcgtcagtagataactccgaatttc
agcagcctttgaaccagggtatcccggtcgcgccacatacaacggagcccatgttgatggaatacccc
gaagcaatcacgagacttgtgacgggagcgcagcggcctcccgatcccgcacccgcacctttgggggc
acctggcctccctaacggacttttgagcggcgacgaggatttctcctccatcgccgatatggatttct
cagccttgctgtcacagatttccagcggctctggcagcggcagccgggattccagggaagggatgttt
ttgccgaagcctgaggccggctccgctattagtgacgtgtttgagggccgcgaggtgtgccagccaaa
acgaatccggccatttcatcctccaggaagtccatgggccaaccgcccactccccgccagcctcgcac
caacaccaaccggtccagtacatgagccagtcgggtcactgaccccggcaccagtccctcagccactg
gatccagcgcccgcagtgactcccgaggccagtcacctgttggaggatcccgatgaagagacgagcca
ggctgtcaaagcccttcgggagatggccgatactgtgattccccagaaggaagaggctgcaatctgtg
gccaaatggacctttcccatccgcccccaaggggccatctggatgagctgacaaccacacttgagtcc
atgaccgaggatctgaacctggactcacccctgaccccggaattgaacgagattctggataccttcct
gaacgacgagtgcctcttgcatgccatgcatatcagcacaggactgtccatcttcgacacatctctgt
tt
SEQ ID NO: 148
Polynucleotide sequence encoding Streptccoccus pyogenes dCas9-KRAB
atggactacaaagaccatgacggtgattataaagatcatgacatcgattacaaggatgacgatgacaa
gatggcccccaagaagaagaggaaggtgggccgcggaatggacaagaagtactccattgggctcgcca
tcggcacaaacagcgtcggctgggccgtcattacggacgagtacaaggtgccgagcaaaaaattcaaa
gttctgggcaataccgatcgccacagcataaagaagaacctcattggcgccctcctgttcgactccgg
ggaaaccgccgaagccacgcggctcaaaagaacagcacggcgcagatatacccgcagaaagaatcgga
tctgctacctgcaggagatctttagtaatgagatggctaaggtggatgactctttcttccataggctg
gaggagtcctttttggtggaggaggataaaaagcacgagcgccacccaatctttggcaatatcgtgga
cgaggtggcgtaccatgaaaagtacccaaccatatatcatctgaggaagaagcttgtagacagtactg
ataaggctgacttgcggttgatctatctcgcgctggcgcatatgatcaaatttcggggacacttcctc
atcgagggggacctgaacccagacaacagcgatgtcgacaaactctttatccaactggttcagactta
caatcagcttttcgaagagaacccgatcaacgcatccggagttgacgccaaagcaatcctgagcgcta
ggctgtccaaatcccggcggctcgaaaacctcatcgcacagctccctggggagaagaagaacggcctg
tttggtaatcttatcgccctgtcactcgggctgacccccaactttaaatctaacttcgacctggccga
agatgccaagcttcaactgagcaaagacacctacgatgatgatctcgacaatctgctggcccagatcg
gcgaccagtacgcagacctttttttggcggcaaagaacctgtcagacgccattctgctgagtgatatt
ctgcgagtgaacacggagatcaccaaagctccgctgagcgctagtatgatcaagcgctatgatgagca
ccaccaagacttgactttgctgaaggcccttgtcagacagcaactgcctgagaagtacaaggaaattt
tcttcgatcagtctaaaaatggctacgccggatacattgacggcggagcaagccaggaggaattttac
aaatttattaagcccatcttggaaaaaatggacggcaccgaggagctgctggtaaagcttaacagaga
agatctgttgcgcaaacagcgcactttcgacaatggaagcatcccccaccagattcacctgggcgaac
tgcacgctatcctcaggcggcaagaggatttctacccctttttgaaagataacagggaaaagattgag
aaaatcctcacatttaggataccctactatgtaggccccctcgcccggggaaattccagattcgcgtg
gatgactcgcaaatcagaagagaccatcactccctggaacttcgaggaagtcgtggataagggggcct
ctgcccagtccttcatcgaaaggatgactaactttgataaaaatctgcctaacgaaaaggtgcttcct
aaacactctctgctgtacgagtacttcacagtttataacgagctcaccaaggtcaaatacgtcacaga
agggatgagaaagccagcattcctgtctggagagcagaagaaagctatcgtggacctcctcttcaaga
cgaaccggaaagttaccgtgaaacagctcaaagaagactatttcaaaaagattgaatgtttcgactct
gttgaaatcagcggagtggaggatcgcttcaacgcatccctgggaacgtatcacgatctcctgaaaat
cattaaagacaaggacttcctggacaatgaggagaacgaggacattcttgaggacattgtcctcaccc
ttacgttgtttgaagatagggagatgattgaagaacgcttgaaaacttacgctcatctcttcgacgac
aaagtcatgaaacagctcaagaggcgccgatatacaggatgggggcggctgtcaagaaaactgatcaa
tgggatccgagacaagcagagtggaaagacaatcctggattttcttaagtccgatggatttgccaacc
ggaacttcatgcagttgatccatgatgactctctcacctttaaggaggacatccagaaagcacaagtt
tctggccagggggacagtcttcacgagcacatcgctaatcttgcaggtagcccagctatcaaaaaggg
aatactgcagaccgttaaggtcgtggatgaactcgtcaaagtaatgggaaggcataagcccgagaata
tcgttatcgagatggcccgagagaaccaaactacccagaagggacagaagaacagtagggaaaggatg
aagaggattgaagagggtataaaagaactggggtcccaaatccttaaggaacacccagttgaaaacac
ccagcttcagaatgagaagctctacctgtactacctgcagaacggcagggacatgtacgtggatcagg
aactggacatcaatcggctctccgactacgacgtggatgccatcgtgccccagtcttttctcaaagat
gattctattgataataaagtgttgacaagatccgataaaaatagagggaagagtgataacgtcccctc
agaagaagttgtcaagaaaatgaaaaattattggcggcagctgctgaacgccaaactgatcacacaac
ggaagttcgataatctgactaaggctgaacgaggtggcctgtctgagttggataaagccggcttcatc
aaaaggcagcttgttgagacacgccagatcaccaagcacgtggcccaaattctcgattcacgcatgaa
caccaagtacgatgaaaatgacaaactgattcgagaggtgaaagttattactctgaagtctaagctgg
tctcagatttcagaaaggactttcagttttataaggtgagagagatcaacaattaccaccatgcgcat
gatgcctacctgaatgcagtggtaggcactgcacttatcaaaaaatatcccaagcttgaatctgaatt
tgtttacggagactataaagtgtacgatgttaggaaaatgatcgcaaagtctgagcaggaaataggca
aggccaccgctaagtacttcttttacagcaatattatgaattttttcaagaccgagattacactggcc
aatggagagattcggaagcgaccacttatcgaaacaaacggagaaacaggagaaatcgtgtgggacaa
gggtagggatttcgcgacagtccggaaggtcctgtccatgccgcaggtgaacatcgttaaaaagaccg
aagtacagaccggaggcttctccaaggaaagtatcctcccgaaaaggaacagcgacaagctgatcgca
cgcaaaaaagattgggaccccaagaaatacggcggattcgattctcctacagtcgcttacagtgtact
ggttgtggccaaagtggagaaagggaagtctaaaaaactcaaaagcgtcaaggaactgctgggcatca
caatcatggagcgatcaagcttcgaaaaaaaccccatcgactttctcgaggcgaaaggatataaagag
gtcaaaaaagacctcatcattaagcttcccaagtactctctctttgagcttgaaaacggccggaaacg
aatgctcgctagtgcgggcgagctgcagaaaggtaacgagctggcactgccctctaaatacgttaatt
tcttgtatctggccagccactatgaaaagctcaaagggtctcccgaagataatgagcagaagcagctg
ttcgtggaacaacacaaacactaccttgatgagatcatcgagcaaataagcgaattctccaaaagagt
gatcctcgccgacgctaacctcgataaggtgctttctgcttacaataagcacagggataagcccatca
gggagcaggcagaaaacattatccacttgtttactctgaccaacttgggcgcgcctgcagccttcaag
tacttcgacaccaccatagacagaaagcggtacacctctacaaaggaggtcctggacgccacactgat
tcatcagtcaattacggggctctatgaaacaagaatcgacctctctcagctcggtggagacagcaggg
ctgaccccaagaagaagaggaaggtggctagcgatgctaagtcactgactgcctggtcccggacactg
gtgaccttcaaggatgtgtttgtggacttcaccagggaggagtggaagctgctggacactgctcagca
gatcctgtacagaaatgtgatgctggagaactataagaacctggtttccttgggttatcagcttacta
agccagatgtgatcctccggttggagaagggagaagagccctggctggtggagagagaaattcaccaa
gagacccatcctgattcagagactgcatttgaaatcaaatcatcagttccgaaaaagaaacgcaaagt
ttga
SEQ ID NO: 149
Polypeptide sequence of Streptccoccus pyogenes dCas9-KRAB protein
MDYKDHDGDYKDHDIDYKDDDDKMAPKKKRKVGRGMDKKYSIGLAIGTNSVGWAVITDEYKVPSKKFK
VLGNTDRHSIKKNLIGALLFDSGETAEATRLKRTARRRYTRRKNRICYLQEIFSNEMAKVDDSFFHRL
EESFLVEEDKKHERHPIFGNIVDEVAYHEKYPTIYHLRKKLVDSTDKADLRLIYLALAHMIKFRGHFL
IEGDLNPDNSDVDKLFIQLVQTYNQLFEENPINASGVDAKAILSARLSKSRRLENLIAQLPGEKKNGL
FGNLIALSLGLTPNFKSNFDLAEDAKLQLSKDTYDDDLDNLLAQIGDQYADLFLAAKNLSDAILLSDI
LRVNTEITKAPLSASMIKRYDEHHQDLTLLKALVRQQLPEKYKEIFFDQSKNGYAGYIDGGASQEEFY
KFIKPILEKMDGTEELLVKLNREDLLRKQRTFDNGSIPHQIHLGELHAILRRQEDFYPFLKDNREKIE
KILTFRIPYYVGPLARGNSRFAWMTRKSEETITPWNFEEVVDKGASAQSFIERMTNFDKNLPNEKVLP
KHSLLYEYFTVYNELTKVKYVTEGMRKPAFLSGEQKKAIVDLLFKTNRKVTVKQLKEDYFKKIECFDS
VEISGVEDRFNASLGTYHDLLKIIKDKDFLDNEENEDILEDIVLTLTLFEDREMIEERLKTYAHLFDD
KVMKQLKRRRYTGWGRLSRKLINGIRDKQSGKTILDFLKSDGFANRNFMQLIHDDSLTFKEDIQKAQV
SGQGDSLHEHIANLAGSPAIKKGILQTVKVVDELVKVMGRHKPENIVIEMARENQTTQKGQKNSRERM
KRIEEGIKELGSQILKEHPVENTQLQNEKLYLYYLQNGRDMYVDQELDINRLSDYDVDAIVPQSFLKD
DSIDNKVLTRSDKNRGKSDNVPSEEVVKKMKNYWROLLNAKLITQRKFDNLTKAERGGLSELDKAGFI
KRQLVETRQITKHVAQILDSRMNTKYDENDKLIREVKVITLKSKLVSDFRKDFQFYKVREINNYHHAH
DAYLNAVVGTALIKKYPKLESEFVYGDYKVYDVRKMIAKSEQEIGKATAKYFFYSNIMNFFKTEITLA
NGEIRKRPLIETNGETGEIVWDKGRDFATVRKVLSMPQVNIVKKTEVQTGGFSKESILPKRNSDKLIA
RKKDWDPKKYGGFDSPTVAYSVLVVAKVEKGKSKKLKSVKELLGITIMERSSFEKNPIDFLEAKGYKE
VKKDLIIKLPKYSLFELENGRKRMLASAGELQKGNELALPSKYVNFLYLASHYEKLKGSPEDNEQKQL
FVEQHKHYLDEIIEQISEFSKRVILADANLDKVLSAYNKHRDKPIREQAENIIHLFTLTNLGAPAAFK
YFDTTIDRKRYTSTKEVLDATLIHQSITGLYETRIDLSQLGGDSRADPKKKRKVASDAKSLTAWSRTL
VTFKDVFVDFTREEWKLLDTAQQILYRNVMLENYKNLVSLGYQLTKPDVILRLEKGEEPWLVEREIHQ
ETHPDSETAFEIKSSVPKKKRKV
SEQ ID NO: 150
Polynucleotide sequence of Staphylococcus aureus dCas9-KRAB protein
atggccccaaagaagaagcggaaggtcggtatccacggagtcccagcagccaagcggaactacatcct
gggcctggccatcggcatcaccagcgtgggctacggcatcatcgactacgagacacgggacgtgatcg
atgccggcgtgcggctgttcaaagaggccaacgtggaaaacaacgagggcaggcggagcaagagaggc
gccagaaggctgaagcggcggaggcggcatagaatccagagagtgaagaagctgctgttcgactacaa
cctgctgaccgaccacagcgagctgagcggcatcaacccctacgaggccagagtgaagggcctgagcc
agaagctgagcgaggaagagttctctgccgccctgctgcacctggccaagagaagaggcgtgcacaac
gtgaacgaggtggaagaggacaccggcaacgagctgtccaccaaagagcagatcagccggaacagcaa
ggccctggaagagaaatacgtggccgaactgcagctggaacggctgaagaaagacggcgaagtgcggg
gcagcatcaacagattcaagaccagcgactacgtgaaagaagccaaacagctgctgaaggtgcagaag
gcctaccaccagctggaccagagcttcatcgacacctacatcgacctgctggaaacccggcggaccta
ctatgagggacctggcgagggcagccccttcggctggaaggacatcaaagaatggtacgagatgctga
tgggccactgcacctacttccccgaggaactgcggagcgtgaagtacgcctacaacgccgacctgtac
aacgccctgaacgacctgaacaatctcgtgatcaccagggacgagaacgagaagctggaatattacga
gaagttccagatcatcgagaacgtgttcaagcagaagaagaagcccaccctgaagcagatcgccaaag
aaatcctcgtgaacgaagaggatattaagggctacagagtgaccagcaccggcaagcccgagttcacc
aacctgaaggtgtaccacgacatcaaggacattaccgcccggaaagagattattgagaacgccgagct
gctggatcagattgccaagatcctgaccatctaccagagcagcgaggacatccaggaagaactgacca
atctgaactccgagctgacccaggaagagatcgagcagatctctaatctgaagggctataccggcacc
cacaacctgagcctgaaggccatcaacctgatcctggacgagctgtggcacaccaacgacaaccagat
cgctatcttcaaccggctgaagctggtgcccaagaaggtggacctgtcccagcagaaagagatcccca
ccaccctggtggacgacttcatcctgagccccgtcgtgaagagaagcttcatccagagcatcaaagtg
atcaacgccatcatcaagaagtacggcctgcccaacgacatcattatcgagctggcccgcgagaagaa
ctccaaggacgcccagaaaatgatcaacgagatgcagaagcggaaccggcagaccaacgagcggatcg
aggaaatcatccggaccaccggcaaagagaacgccaagtacctgatcgagaagatcaagctgcacgac
atgcaggaaggcaagtgcctgtacagcctggaagccatccctctggaagatctgctgaacaacccctt
caactatgaggtggaccacatcatccccagaagcgtgtccttcgacaacagcttcaacaacaaggtgc
tcgtgaagcaggaagaagccagcaagaagggcaaccggaccccattccagtacctgagcagcagcgac
agcaagatcagctacgaaaccttcaagaagcacatcctgaatctggccaagggcaagggcagaatcag
caagaccaagaaagagtatctgctggaagaacgggacatcaacaggttctccgtgcagaaagacttca
tcaaccggaacctggtggataccagatacgccaccagaggcctgatgaacctgctgcggagctacttc
agagtgaacaacctggacgtgaaagtgaagtccatcaatggcggcttcaccagctttctgcggcggaa
gtggaagtttaagaaagagcggaacaaggggtacaagcaccacgccgaggacgccctgatcattgcca
acgccgatttcatcttcaaagagtggaagaaactggacaaggccaaaaaagtgatggaaaaccagatg
ttcgaggaaaagcaggccgagagcatgcccgagatcgaaaccgagcaggagtacaaagagatcttcat
caccccccaccagatcaagcacattaaggacttcaaggactacaagtacagccaccgggtggacaaga
agcctaatagagagctgattaacgacaccctgtactccacccggaaggacgacaagggcaacaccctg
atcgtgaacaatctgaacggcctgtacgacaaggacaatgacaagctgaaaaagctgatcaacaagag
ccccgaaaagctgctgatgtaccaccacgacccccagacctaccagaaactgaagctgattatggaac
agtacggcgacgagaagaatcccctgtacaagtactacgaggaaaccgggaactacctgaccaagtac
tccaaaaaggacaacggccccgtgatcaagaagattaagtattacggcaacaaactgaacgcccatct
ggacatcaccgacgactaccccaacagcagaaacaaggtcgtgaagctgtccctgaagccctacagat
tcgacgtgtacctggacaatggcgtgtacaagttcgtgaccgtgaagaatctggatgtgatcaaaaaa
gaaaactactacgaagtgaatagcaagtgctatgaggaagctaagaagctgaagaagatcagcaacca
ggccgagtttatcgcctccttctacaacaacgatctgatcaagatcaacggcgagctgtatagagtga
tcggcgtgaacaacgacctgctgaaccggatcgaagtgaacatgatcgacatcacctaccgcgagtac
ctggaaaacatgaacgacaagaggccccccaggatcattaagacaatcgcctccaagacccagagcat
taagaagtacagcacagacattctgggcaacctgtatgaagtgaaatctaagaagcaccctcagatca
tcaaaaagggcaaaaggccggCggccacgaaaaaggccggccaggcaaaaaagaaaaagggatccgat
gctaagtcactgactgcctggtcccggacactggtgaccttcaaggatgtgtttgtggacttcaccag
ggaggagtggaagctgctggacactgctcagcagatcctgtacagaaatgtgatgctggagaactata
agaacctggtttccttgggttatcagcttactaagccagatgtgatcctccggttggagaagggagaa
gagccctggctggtggagagagaaattcaccaagagacccatcctgattcagagactgcatttgaaat
caaatcatcagttccgaaaaagaaacgcaaagtt
SEQ ID NO: 151
Polypeptide sequence of Staphylococcus aureus dCas9-KRAB protein
MAPKKKRKVGIHGVPAAKRNYILGLAIGITSVGYGIIDYETRDVIDAGVRLFKEANVENNEGRRSKRG
ARRLKRRRRHRIQRVKKLLFDYNLLTDHSELSGINPYEARVKGLSQKLSEEEFSAALLHLAKRRGVHN
VNEVEEDTGNELSTKEQISRNSKALEEKYVAELQLERLKKDGEVRGSINRFKTSDYVKEAKQLLKVQK
AYHQLDQSFIDTYIDLLETRRTYYEGPGEGSPFGWKDIKEWYEMLMGHCTYFPEELRSVKYAYNADLY
NALNDLNNLVITRDENEKLEYYEKFQIIENVFKQKKKPTLKQTAKEILVNEEDIKGYRVTSTGKPEFT
NLKVYHDIKDITARKEIIENAELLDQIAKILTIYQSSEDIQEELTNLNSELTQEEIEQISNLKGYTGT
HNLSLKAINLILDELWHTNDNQIAIFNRLKLVPKKVDLSQQKEIPTTLVDDFILSPVVKRSFIQSIKV
INAIIKKYGLPNDIIIELAREKNSKDAQKMINEMQKRNRQTNERIEEIIRTTGKENAKYLIEKIKLHD
MQEGKCLYSLEAIPLEDLLNNPFNYEVDHIIPRSVSFDNSENNKVLVKQEEASKKGNRTPFQYLSSSD
SKISYETFKKHILNLAKGKGRISKTKKEYLLEERDINRESVQKDFINRNLVDTRYATRGLMNLLRSYF
RVNNLDVKVKSINGGFTSFLRRKWKFKKERNKGYKHHAEDALIIANADFIFKEWKKLDKAKKVMENQM
FEEKQAESMPEIETEQEYKEIFITPHQIKHIKDFKDYKYSHRVDKKPNRELINDTLYSTRKDDKGNTL
IVNNLNGLYDKDNDKLKKLINKSPEKLLMYHHDPQTYQKLKLIMEQYGDEKNPLYKYYEETGNYLTKY
SKKDNGPVIKKIKYYGNKLNAHLDITDDYPNSRNKVVKLSLKPYRFDVYLDNGVYKFVTVKNLDVIKK
ENYYEVNSKCYEEAKKLKKISNQAEFTASFYNNDLIKINGELYRVIGVNNDLLNRIEVNMIDITYREY
LENMNDKRPPRIIKTIASKTQSIKKYSTDILGNLYEVKSKKHPQIIKKGKRPAATKKAGQAKKKKGSD
AKSLTAWSRTLVTFKDVFVDFTREEWKLLDTAQQILYRNVMLENYKNLVSLGYQLTKPDVILRLEKGE
EPWLVEREIHQETHPDSETAFEIKSSVPKKKRKV
SEQ ID NO: 152
Polynucleotide sequence of Tet1CD
CTGCCCACCTGCAGCTGTCTTGATCGAGTTATACAAAAAGACAAAGGCCCATATTATACACACCTTGG
GGCAGGACCAAGTGTTGCTGCTGTCAGGGAAATCATGGAGAATAGGTATGGTCAAAAAGGAAACGCAA
TAAGGATAGAAATAGTAGTGTACACCGGTAAAGAAGGGAAAAGCTCTCATGGGTGTCCAATTGCTAAG
TGGGTTTTAAGAAGAAGCAGTGATGAAGAAAAAGTTCTTTGTTTGGTCCGGCAGCGTACAGGCCACCA
CTGTCCAACTGCTGTGATGGTGGTGCTCATCATGGTGTGGGATGGCATCCCTCTTCCAATGGCCGACC
GGCTATACACAGAGCTCACAGAGAATCTAAAGTCATACAATGGGCACCCTACCGACAGAAGATGCACC
CTCAATGAAAATCGTACCTGTACATGTCAAGGAATTGATCCAGAGACTTGTGGAGCTTCATTCTCTTT
TGGCTGTTCATGGAGTATGTACTTTAATGGCTGTAAGTTTGGTAGAAGCCCAAGCCCCAGAAGATTTA
GAATTGATCCAAGCTCTCCCTTACATGAAAAAAACCTTGAAGATAACTTACAGAGTTTGGCTACACGA
TTAGCTCCAATTTATAAGCAGTATGOTCCAGTAGCTTACCAAAATCAGGTGGAATATGAAAATGTTGC
CCGAGAATGTCGGCTTGGCAGCAAGGAAGGTCGACCCTTCTCTGGGGTCACTGCTTGCCTGGACTTCT
GTGCTCATCCCCACAGGGACATTCACAACATGAATAATGGAAGCACTGTGGTTTGTACCTTAACTCGA
GAAGATAACCGOTCTTTGGGTGTTATTCCTCAAGATGAGCAGCTCCATGTGCTACCTCTTTATAAGCT
TTCAGACACAGATGAGITTGGCTCCAAGGAAGGAATGGAAGCCAAGATCAAATCTGGGGCCATCGAGG
TCCTGGCACCCCGCCGCAAAAAAAGAACGTGTTTCACTCAGCCTGTTCCCCGTTCTGGAAAGAAGAGG
GCTGCGATGATGACAGAGGTTCTTGCACATAAGATAAGGGCAGTGGAAAAGAAACCTATTCCCCGAAT
CAAGCGGAAGAATAACTCAACAACAACAAACAACAGTAAGCCTTCGTCACTGCCAACCTTAGGGAGTA
ACACTGAGACCGTGCAACCTGAAGTAAAAAGTGAAACCGAACCCCATTTTATCTTAAAAAGTTCAGAC
AACACTAAAACTTATTCGCTGATGCCATCCGCTCCTCACCCAGTGAAAGAGGCATCTCCAGGCTTCTC
CTGGTCCCCGAAGACTGCTTCAGCCACACCAGCTCCACTGAAGAATGACGCAACAGCCTCATGCGGGT
TTTCAGAAAGAAGCAGCACTCCCCACTGTACGATGCCTTCGGGAAGACTCAGTGGTGCCAATGCTGCA
GCTGCTGATGGCCCTGGCATTTCACAGCTTGGCGAAGTGGCTCCTCTCCCCACCCTGTCTGCTCCTGT
GATGGAGCCCCTCATTAATTCTGAGCCTTCCACTGGTGTGACTGAGCCGCTAACGCCTCATCAGCCAA
ACCACCAGCCCTCCTTCCTCACCTCTCCTCAAGACCTTGCCTCTTCTCCAATGGAAGAAGATGAGCAG
CATTCTGAAGCAGATGAGCCTCCATCAGACGAACCCCTATCTGATGACCCCCTGTCACCTGCTGAGGA
GAAATTGCCCCACATTGATGAGTATTGGTCAGACAGTGAGCACATCITTTTGGATGCAAATATTGGTG
GGGTGGCCATCGCACCTGCTCACGGCTCGGTTTTGATTGAGTGTGCCCGGCGAGAGCTGCACGCTACC
ACTCCTGTTGAGCACCCCAACCGTAATCATCCAACCCGCCTCTCCCTTGTCTTTTACCAGCACAAAAA
CCTAAATAAGCCCCAACATGGTTTTGAACTAAACAAGATTAAGTTTGAGGCTAAAGAAGCTAAGAATA
AGAAAATGAAGGCCTCAGAGCAAAAAGACCAGGCAGCTAATGAAGGTCCAGAACAGTCCTCTGAAGTA
AATGAATTGAACCAAATTCCTTCTCATAAAGCATTAACATTAACCCATGACAATGTTGTCACCGTGTC
CCCTTATGCTCTCACACACGTTGCGGGGCCCTATAACCATTGGGTC
SEQ ID NO: 153
Polypeptide sequence of Tet1CD
LPTCSCLDRVIQKDKGPYYTHLGAGPSVAAVREIMENRYGQKGNAIRIEIVVYTGKEGKSSHGCPIAK
WVLRRSSDEEKVLCLVRQRTGHHCPTAVMVVLIMVWDGIPLPMADRLYTELTENLKSYNGHPTDRRCT
LNENRTCTCQGIDPETCGASFSFGCSWSMYFNGCKFGRSPSPRRFRIDPSSPLHEKNLEDNLQSLATR
LAPIYKQYAPVAYQNQVEYENVARECRLGSKEGRPFSGVTACLDFCAHPHRDIHNMNNGSTVVCTLTR
EDNRSLGVIPQDEQLHVLPLYKLSDTDEFGSKEGMEAKIKSGAIEVLAPREKKRTCFTQPVPRSGKKR
AAMMTEVLAHKIRAVEKKPIPRIKRKNNSTTTNNSKPSSLPTLGSNTETVQPEVKSETEPHFILKSSD
NTKTYSLMPSAPHPVKEASPGFSWSPKTASATPAPLKNDATASCGFSERSSTPHCTMPSGRLSGANAA
AADGPGISQLGEVAPLPTLSAPVMEPLINSEPSTGVTEPLTPHQPNHQPSFLTSPQDLASSPMEEDEQ
HSEADEPPSDEPLSDDPLSPAEEKLPHIDEYWSDSEHIFLDANIGGVAIAPAHGSVLIECARRELHAT
TPVEHPNRNHPTRLSLVFYQHKNLNKPQHGFELNKIKFEAKEAKNKKMKASEQKDQAANEGPEQSSEV
NELNQIPSHKALTLTHDNVVTVSPYALTHVAGPYNHWV
SEQ ID NO: 154
DNA encoding Super exon (exons 45-79) of human DMD
gaactccaggatggcattgggcagcggcaaactgttgtcagaacattgaatgcaactggggaagaaat
aattcagcaatcctcaaaaacagatgccagtattctacaggaaaaattgggaagcctgaatctgcggt
ggcaggaggtctgcaaacagctgtcagacagaaaaaagaggctagaagaacaaaagaatatcttgtca
gaatttcaaagagatttaaatgaatttgttttatggttggaggaagcagataacattgctagtatccc
acttgaacctggaaaagagcagcaactaaaagaaaagcttgagcaagtcaagttactggtggaagagt
tgcccctgcgccagggaattctcaaacaattaaatgaaactggaggacccgtgcttgtaagtgctccc
ataagcccagaagagcaagataaacttgaaaataagctcaagcagacaaatctccagtggataaaggt
ttccagagctttacctgagaaacaaggagaaattgaagctcaaataaaagaccttgggcagcttgaaa
aaaagcttgaagaccttgaagagcagttaaatcatctgctgctgtggttatctcctattaggaatcag
ttggaaatttataaccaaccaaaccaagaaggaccatttgacgttcaggaaactgaaatagcagttca
agctaaacaaccggatgtggaagagattttgtctaaagggcagcatttgtacaaggaaaaaccagcca
ctcagccagtgaagaggaagttagaagatctgagctctgagtggaaggcggtaaaccgtttacttcaa
gagctgagggcaaagcagcctgacctagctcctggactgaccactattggagcctctcctactcagac
tgttactctggtgacacaacctgtggttactaaggaaactgccatctccaaactagaaatgccatctt
ccttgatgttggaggtacctgctctggcagatttcaaccgggcttggacagaacttaccgactggctt
tctctgcttgatcaagttataaaatcacagagggtgatggtgggtgaccttgaggatatcaacgagat
gatcatcaagcagaaggcaacaatgcaggatttggaacagaggcgtccccagttggaagaactcatta
ccgctgcccaaaatttgaaaaacaagaccagcaatcaagaggctagaacaatcattacggatcgaatt
gaaagaattcagaatcagtgggatgaagtacaagaacaccttcagaaccggaggcaacagttgaatga
aatgttaaaggattcaacacaatggctggaagctaaggaagaagctgagcaggtcttaggacaggcca
gagccaagcttgagtcatggaaggagggtccctatacagtagatgcaatccaaaagaaaatcacagaa
accaagcagttggccaaagacctccgccagtggcagacaaatgtagatgtggcaaatgacttggccct
gaaacttctccgggattattctgcagatgataccagaaaagtccacatgataacagagaatatcaatg
cctcttggagaagcattcataaaagggtgagtgagcgagaggctgctttggaagaaactcatagatta
ctgcaacagttccccctggacctggaaaagtttcttgcctggcttacagaagctgaaacaactgccaa
tgtcctacaggatgctacccgtaaggaaaggctcctagaagactccaagggagtaaaagagctgatga
aacaatggcaagacctccaaggtgaaattgaagctcacacagatgtttatcacaacctggatgaaaac
agccaaaaaatcctgagatccctggaaggttccgatgatgcagtcctgttacaaagacgtttggataa
catgaacttcaagtggagtgaacttcggaaaaagtctctcaacattaggtcccatttggaagccagtt
ctgaccagtggaagcgtctgcacctttctctgcaggaacttctggtgtggctacagctgaaagatgat
gaattaagccggcaggcacctattggaggcgactttccagcagttcagaagcagaacgatgtacatag
ggccttcaagagggaattgaaaactaaagaacctgtaatcatgagtactcttgagactgtacgaatat
ttctgacagagcagcctttggaaggactagagaaactctaccaggagcccagagagctgcctcctgag
gagagagcccagaatgtcactcggcttctacgaaagcaggctgaggaggtcaatactgagtgggaaaa
attgaacctgcactccgctgactggcagagaaaaatagatgagacccttgaaagactccaggaacttc
aagaggccacggatgagctggacctcaagctgcgccaagctgaggtgatcaagggatcctggcagccc
gtgggcgatctcctcattgactctctccaagatcacctcgagaaagtcaaggcacttcgaggagaaat
tgcgcctctgaaagagaacgtgagccacgtcaatgaccttgctcgccagcttaccactttgggcattc
agctctcaccgtataacctcagcactctggaagacctgaacaccagatggaagcttctgcaggtggcc
gtcgaggaccgagtcaggcagctgcatgaagcccacagggactttggtccagcatctcagcactttct
ttccacgtctgtccagggtccctgggagagagccatctcgccaaacaaagtgccctactatatcaacc
acgagactcaaacaacttgctgggaccatcccaaaatgacagagctctaccagtctttagctgacctg
aataatgtcagattctcagcttataggactgccatgaaactccgaagactgcagaaggccctttgctt
ggatctcttgagcctgtcagctgcatgtgatgccttggaccagcacaacctcaagcaaaatgaccagc
ccatggatatcctgcagattattaattgtttgaccactatttatgaccgcctggagcaagagcacaac
aatttggtcaacgtccctctctgcgtggatatgtgtctgaactggctgctgaatgtttatgatacggg
acgaacagggaggatccgtgtcctgtcttttaaaactggcatcatttccctgtgtaaagcacatttgg
aagacaagtacagataccttttcaagcaagtggcaagttcaacaggattttgtgaccagcgcaggctg
ggcctccttctgcatgattctatccaaattccaagacagttgggtgaagttgcatcctttgggggcag
taacattgagccaagtgtccggagctgcttccaatttgctaataataagccagagatcgaagcggccc
tcttcctagactggatgagactggaaccccagtccatggtgtggctgcccgtcctgcacagagtggct
gctgcagaaactgccaagcatcaggccaaatgtaacatctgcaaagagtgtccaatcattggattcag
gtacaggagtctaaagcactttaattatgacatctgccaaagctgctttttttctggtcgagttgcaa
aaggccataaaatgcactatcccatggtggaatattgcactccgactacatcaggagaagatgttcga
gactttgccaaggtactaaaaaacaaatttcgaaccaaaaggtattttgcgaagcatccccgaatggg
ctacctgccagtgcagactgtcttagagggggacaacatggaaactcccgttactctgatcaacttct
ggccagtagattctgcgcctgcctcgtcccctcagctttcacacgatgatactcattcacgcattgaa
cattatgctagcaggctagcagaaatggaaaacagcaatggatcttatctaaatgatagcatctctcc
taatgagagcatagatgatgaacatttgttaatccagcattactgccaaagtttgaaccaggactccc
ccctgagccagcctcgtagtcctgcccagatcttgatttccttagagagtgaggaaagaggggagcta
gagagaatcctagcagatcttgaggaagaaaacaggaatctgcaagcagaatatgaccgtctaaagca
gcagcacgaacataaaggcctgtccccactgccgtcccctcctgaaatgatgcccacctctccccaga
gtccccgggatgctgagctcattgctgaggccaagctactgcgtcaacacaaaggccgcctggaagcc
aggatgcaaatcctggaagaccacaataaacagctggagtcacagttacacaggctaaggcagctgct
ggagcaaccccaggcagaggccaaagtgaatggcacaacggtgtcctctccttctacctctctacaga
ggtccgacagcagtcagcctatgctgctccgagtggttggcagtcaaacttcggactccatgggtgag
gaagatcttctcagtcctccccaggacacaagcacagggttagaggaggtgatggagcaactcaacaa
ctccttccctagttcaagaggaagaaatacccctggaaagccaatgagagaggacacaatgtag
SEQ ID NO: 155
Donor sequence including super exon (exons 45-79) of human DMD
tgggcatgtcagtttcatagggaaattttcacatggagcttttgtatttctttctttgccagtacaac
tgcatgtggtagcacactgtttaatcttttctcaaataaaaagacatggggcttcatttttgttttgc
ctttttggtatcttacaggaactccaggatggcattgggcagcggcaaactgttgtcagaacattgaa
tgcaactggggaagaaataattcagcaatcctcaaaaacagatgccagtattctacaggaaaaattgg
gaagcctgaatctgcggtggcaggaggtctgcaaacagctgtcagacagaaaaaagaggctagaagaa
caaaagaatatcttgtcagaatttcaaagagatttaaatgaatttgttttatggttggaggaagcaga
taacattgctagtatcccacttgaacctggaaaagagcagcaactaaaagaaaagcttgagcaagtca
agttactggtggaagagttgcccctgcgccagggaattctcaaacaattaaatgaaactggaggaccc
gtgcttgtaagtgctcccataagcccagaagagcaagataaacttgaaaataagctcaagcagacaaa
tctccagtggataaaggtttccagagctttacctgagaaacaaggagaaattgaagctcaaataaaag
accttcggcagcttgaaaaaaagcttgaagaccttgaagagcagttaaatcatctgctgctgtggtta
tctcctattaggaatcagttcgaaatttataaccaaccaaaccaagaaggaccatttgacgttcagga
aactgaaatagcagttcaagctaaacaacccgatgtggaagagattttgtctaaagggcagcatttgt
acaaggaaaaaccagccactcagccagtgaagaggaagttagaagatctgagctctgagtggaaggcg
gtaaaccgtttacttcaagagctgagggcaaagcagcctgacctagctcctggactgaccactattgg
agcctctcctactcagactgttactctggtgacacaacctgtggttactaaggaaactgccatctcca
aactagaaatgccatcttccttgatgttggaggtacctgctctggcagatttcaaccgggcttggaca
gaacttaccgactggctttctctgcttgatcaagttataaaatcacagagggtaatggtgggtgacct
tgaggatatcaacgagatgatcatcaagcagaaggcaacaatgcaggatttggaacagaggcgtcccc
agttggaagaactcattaccgctgcccaaaatttgaaaaacaagaccagcaatcaagaggctagaaca
atcattacggatcgaattgaaagaattcagaatcagtgcgatgaagtacaagaacaccttcagaaccg
gaggcaacagttgaatgaaatgttaaaggattcaacacaatggctggaagctaaggaagaagctgagc
aggtcttaggacaggccagagccaagcttgagtcatggaaggagggtccctatacagtagatgcaatc
caaaagaaaatcacagaaaccaagcagttcgccaaagacctccgccagtggcagacaaatgtagatgt
ggcaaatgacttggccctgaaacttctccgggattattctgcagatgataccagaaaagtccacatga
taacagagaatatcaatgcctcttggagaagcattcataaaaggctgagtgagcgagaggctgctttg
gaagaaactcatagattactgcaacagttccccctggacctggaaaagtttcttgcctggcttacaga
agctgaaacaactgccaatgtcctacaggatgctacccgtaaggaaaggctcctagaagactccaagg
gagtaaaagagctgatgaaacaatggcaagacctccaaggtgaaattgaaqctcacacaqatgtttat
cacaacctggatgaaaacagccaaaaaatcctgagatccctggaaggttccgatgatgcagtcctgtt
acaaagacgtttggataacatgaacttcaagtggagtgaacttcggaaaaagtctctcaacattaggt
cccatttggaagccagttctgaccagtggaagcgtctgcacctttctctgcaggaacttctggtgtgg
ctacagctgaaagatgatgaattaagccggcaggcacctattggaggcgactttccagcagttcagaa
gcagaacgatgtacatagggccttcaagagggaattgaaaactaaagaacctgtaatcatgagtactc
ttgagactgtacgaatatttctgacagagcagcctttggaaggactagagaaactctaccaggagccc
agagagctgcctcctgaggagagagcccagaatgtcactcggcttctacgaaagcaggctgaggaggt
caatactgagtcggaaaaattgaacctgcactccgctgactggcagagaaaaatagatgagacccttg
aaagactccaggaacttcaagaggccacggatgagctggacctcaagctgcgccaagctgaggtgatc
aagggatcctggcagcccgtgggcgatctcctcattgactctctccaagatcacctcgagaaagtcaa
ggcacttcgaggagaaattgcgcctctqaaagagaacqtgagccacgtcaatgaccttgctcgccagc
ttaccactttgggcattcagctctcaccgtataacctcagcactctggaagacctgaacaccagatgg
aagcttctgcaggtggccgtcgaggaccgagtcaggcagctgcatgaagcccacagggactttggtcc
agcatctcagcactttctttccacgtctgtccagggtccctgggagagagccatctcgccaaacaaag
tgccctactatatcaaccacgagactcaaacaacttgctgggaccatcccaaaatgacagagctctac
cagtctttagctgacctgaataatgtcagattctcagcttataggactgccatgaaactccgaagact
gcagaaggccctttgcttggatctcttgagcctgtcagctgcatgtgatgccttggaccagcacaacc
tcaagcaaaatgaccagcccatggatatcctgcagattattaattgtttgaccactatttatgaccgc
ctggagcaagagcacaacaatttggtcaacgtccctctctgcgtggatatgtgtctgaactggctgct
gaatgtttatgatacgggacgaacagggaggatccgtgtcctgtcttttaaaactggcatcatttccc
tgtgtaaagcacatttcgaagacaagtacagataccttttcaagcaagtggcaagttcaacaggattt
tgtgaccagcgcaggctgggcctccttctgcatgattctatccaaattccaagacagttgggtgaagt
tgcatcctttgggggcagtaacattgagccaagtgtccggagctgcttccaatttgctaataataagc
cagagatcgaagcggccctcttcctagactggatgagactggaaccccagtccatggtgtggctgccc
gtcctgcacagagtcgctgctgcagaaactgccaagcatcaggccaaatgtaacatctgcaaagagtg
tccaatcattcgattcaggtacaggagtctaaagcactttaattatgacatctgccaaagctgctttt
tttctggtcgagttgcaaaaggccataaaatgcactatcccatggtggaatattgcactccgactaca
tcaggagaagatgttcgagactttcccaaggtactaaaaaacaaatttcgaaccaaaaggtattttgc
gaagcatccccgaatgggctacctgccagtgcagactgtcttagagggggacaacatggaaactcccg
ttactctgatcaacttctggccagtagattctgcgcctgcctcgtcccctcagctttcacacgatgat
actcattcacgcattgaacattatgctagcaggctagcagaaatggaaaacagcaatggatcttatct
aaatgatagcatctctcctaatgagagcatagatgatgaacatttcttaatccagcattactgccaaa
gtttgaaccaggactcccccctgagccagcctcgtagtcctgcccagatcttgatttccttagagagt
gaggaaagaggggagctagagagaatcctagcagatcttgaggaagaaaacaggaatctgcaagcaga
atatgaccgtctaaagcagcagcacgaacataaaggcctgtccccactgccgtcccctcctgaaatga
tgcccacctctccccagagtccccgggatgctgagctcattgctgaggccaagctactccgtcaacac
aaaggccgcctggaagccaggatgcaaatcctggaagaccacaataaacagctcgagtcacagttaca
caggctaaggcagctgctggagcaaccccaggcagaggccaaagtgaatcgcacaacggtgtcctctc
cttctacctctctacagaggtccgacagcagtcagcctatgctgctccgagtggttggcagtcaaact
tcggactccatgggtgaggaagatcttctcagtcctccccaggacacaagcacagggttagaggaggt
gatggagcaactcaacaactccttccctagttcaagaggaagaaatacccctggaaagccaatgagag
aggacacaatgtagtcgtttaaaccgctgatcagcctcgaaacttgtttattgcagcttataatggtt
acaaataaagcaatagcatcacaaatttcacaaataaagcatttttttcactgcattctagttgtggt
ttgtccaaactcatcaatgtatcttagtaagttttttaacaagcatgggacacacaaagcaagatgca
tgacaagtttcaataaaaacttaagttcatatatccccctcacatttataaaaataatgtgaaataat
tgtaaatgataacaattgtgctgagattttcagtccataatgttaccttttaataaatgaatgtaatt
ccattgaatagaagaaatac
SEQ ID NO: 156
Intron 44 sequence of human DMD
gtaagtctttgatttgttttttcgaaattgtatttatcttcagcacatctggactctttaacttctta
aagatcaggttctgaagggtgatggaaattacttttgactgttgttgtcatcattatattactagaaa
gaaaattatcataatgataatattagagcacggtgctatggactttttgtgtcaggatgagagagttt
gcctggacggagctggtttatctgataaactgcaaaatataattgaatctgtgacagagggaagcatc
gtaacagcaaggtgttttgtggctttggggcagtgtgtatttcggctttatgttggaacctttccaga
aggagaacttgtggcatacttagctaaaatgaagttgctagaaatatccatcatgataaaattacagt
tctgttttcctaaagacaattttgtagtgctgtagcaatatttctatatattctattgacaaaatgcc
ttctgaaatagtccagaggccaaaacaatgcagagttaattgttggtacttattgacattttatggtt
tatgttaatagggaaacagcatatggatgataaccagtgtgtagtttaatttcaacttgtggtgtcct
ttgaatatgcaggtaaagatagattagattgtccaggatataatttggttgctaaattacatagttta
ggcataagaaacactgtgtttattacacgaagacttaattatttttgcatcttttttagctcaaattg
ttcatgttgcaatagtcaatcaagtggatttgaattgtagccaatttttaatgccagaaaatactgat
taagacagatgagggcaaaaaacacccagtagtttattaaatactttagatatttcaaaatgctggat
tcacaaaagcagtatcacatttgactttacaagtcttcattctcaaatatgtttccatagtaaatatg
ccctttaatattaaggagttaagcatttaaacacctatttatatgataagctatttaaacacagaaaa
tatttttaaaaccttgtgtaattatatgtgtatcaatcaaacttgcatgcacaccagcgttggcattt
gtatagagaggaaatgtatggattcccaatctgctttaatatagaagatacattttaaaaatagcact
gaagtgaattttgggctaatgtagcataatggggtttctgcctgagaggcagaaacatattagagtta
tataaaatgttttggggtagatatagaaaccacttgccattttcaatgatatccaacccaaggtagtt
atatatttcaatttatattttattatcaaattagtacttattgtgaaaaaaatcaagtaacatagaaa
tttgtaaaagtacctccattctactctttggaggatagttgttcagtatgaattttgctacatatttc
aggctgggtttcttggaaagccattgtaaaatggagatttgtatgtagaaggttaactagggagtact
tttacgatgaagcaatttgttttgatgtaacttggtgtagttttcttcatgtttcttgttcttgaagt
cagttaagctcttgaatctgtgcatttaacatttcatcaaatttagaaacctttcaaccattttttta
aaaaaaatggaactccaattgtacatttattaggctccttaaagtgccccactactcactgatgttat
gttcattgtctgtttggtctctcttttctctgtaatttttttatataatctctattgtcaaattgac
taatctttttcaaagtctaatctatggctaatcccatgtagtatatatttttaacatcagacattttc
atctcttagaagtaaaagttgggtctttttatttcttccatgtgtctactcaacatgttcagtcttta
ctttcttgactatatggaatacagatataataactgttagaatattcttctctactaattttatcatc
tgtgtctattctgggttaatttaaattgatttatttttctcctcattaagtgtgttgtttaactgctt
ctttggatgactggtaatttttgactatatgccagacattgtgaattttaacttagcgcgtgcttgat
acttcaaataaattcaaatatattgaaataaatattctcaaacctcgttctggaacacagttaattca
cttggaaacaatttgatcttttgagaatcttccttttatgctttgttatgaccagaacagtgtaagtt
tagggctactttttccccactactgaggcaaaacccttctgagtactctctctgatgtcctgtgaatg
ataaaatttttcactggggctcgtgggaacaggtggtattactagccacgtgtgagctctggtgattg
tttcctttaattcttttgtgaagttctttccttagctttgagtggttttcttgcatacatgaactgat
caagactcagatgaagaataaaataaagctttctacaaatctccaaaatttcctctgtgtatatatca
cctctctggtattttgccctgtgatcactagtcagccttgggctgctgaaactctcagcttcatcttt
taacaaaagcctcctggcaaggatcactgtccttcaatgtctgatgttcaatgtgttgaaaaccgttg
tagcatatattttgtctttttttttttttttttttttttaagtgtttcaggtgtttcaggcaggagat
taagttcagcctcctttactccaacttgaaaacaagtccaaaacaaactattttgatgtaatttgatc
ttttaatacattaacattacacaattttgtgaatatatcataatttaaaattttcagagaatgtctaa
tggtcctcatttcttgacagtgtggtttagttgaaactgatgaacattttatcaaaacttttcccctc
aattggatacttttttttttttgagatggaattttgcttttgtcacccaggctggagtggcatgatct
cagctcactgcaacctctgcctccaggcttcaagcaattctcctgccttagcctcccgagtagctggg
attacaggtgcccacccccacacctggctaatttttgtatttttagtagagacgagatttcaccatgt
tggtcaggctggtctagatctccgacctcaggtggtctgcctgtctcagcctcccaaagtgctgggat
tgcagacgtgagccaccatgcctggccaactggataattttaaaaagaccattttatttagtctattt
tttctcaatctatagatgagataagaaaaatcattctagatgtccaaggaaaaattctttcagaaaag
agctgtgaatgatatcacaaaccccccaaacagttaaggtatttctttcctggttattttatgtccaa
aatcatgcatatgaacatgtgcacacacatgagcgtgcacacacacatgaatacatatacacgcacat
aatgtaccttaggttatctttccattctgagtaattatcgtaaaatgggtaaaatcaaccccgtaaga
taccttcatcgataaggcaaatcaaagctttggtaatttctgctatcttggcctttgttgattgacta
ataatgaataagagaatgagtttcaatatttactatgaaattattttagaagacaggatgtagacagt
ggctgttagcaggcaattgtttggcatgagccagtaatggttactgtgaaaaaaatcaaccaagcagc
ccatatattaaacaaacacacgcagaagcacgttggagtctgaagcctcatatgtacaattttcagta
aagaaataacttttagatatgaaataaacaaatagatatatgttgtaaacttgtccctatgtattttg
atcaaattgcatcatatttttttcactttaaagaagagaatttagtgctttaactgagacttagtgtt
atcattcaaaatatactgactgccaatagcagtagaaagataatctggttccatgcaactctattttt
tttcctctgtcgcaagtaaaagacaaaattaagtacatgaattagtgctttttgaagatattccagag
caatataccatgccactatggagaacctctctaaaaatatcccatttttttacctgagaaaaatattg
atcatgttatatgccactcaaattggtttattaaattcgttgaatgatatcagcatctcttaatgcat
tcactaaacaagcagtaattgagtgcatatacaaagttttatcatccaccaaaacagtgacaatccac
atgaggctctaatagaagtttagaaagggggttaagtggttaaatgctggactcagaaagattggatt
caaatcccaggtcctttagcttaatagttgtagaatcttgtgaaaatatcttaattcttttcatgtct
ctgatttctcttctctaaaatggaaatataaatgagatgtgtataaagccacttggaatagcattttg
cacaaaataattactcattaaatgtaagcccctattataactaatcactctttataagtgattagttc
atatcaatacaaactaagacttatttactgaattatcgtctctaaacatccacactgcagaaaaacca
acctggaaatttcataaaaccttatttttatgtagtataatttcttctcaaagcataagggctcttgg
attaggaattgaggaaaattccaattcagccaaacgcatctgtttcagatagctgacacttctgccta
ctcatttcctagctaacaagaagaaatgttaatgggagttttcaaaggaaaagctgaacaccatgaag
gaaagtgacacaaataatgttagctcatatattgacagggtgaatttgtgtgctttcaagtcccttca
gtgaaaataggaaagtagaaattataaaatgccctaacatttaaagctagcatgttcttggagactag
gaaaaaataagttttaaaacatgggctatgatagaatgagatggaaaatgtttgtagttgccagtaga
aacaataacaattaccattagattaagtatttaaaccagctgaatatttttattaatggaaatggcat
ctgttttatgaaataatgctgctgaatgaaccatattaaaaatgaccagtatttcctgcagaacgttg
tcgcagacatacaagcctgagaccctaaaatcttaaggtattccatttgaaatcgaccttaagacatt
aacagtagtggtattgtttagatgaaattttttaggctttaaatcaacaaatgttaagcagacatggg
gagcgaaacaccagtgtgttattctgacatgaataaactgctgtttttagggaaaaaatatagtcttg
ttaaggttaagctaattggttttctggtatcttttgcaatgttagtgtgttttactgctccataacct
atgttatatggtaaatgtgcaatatatttatatatgttgctgtaaagaaatgtaataaaaaactgttt
actttgtgatatgaaagtaaaaatttattcattgtcattgagcatacagaagtaaatatggattacat
atgtcatattttaatgttcacatggtcccaccatcaaatgttgaaaaacttatagtttaacgtcatat
tctattgaagaaaaatacactcccttttctcaaatgtgaaatgtccagagagaatggaaaattacata
taaagcatgtagttatagcatggtgaccctgctgtgatctctcagatgaggaacaaaagggagaaaga
aagagcacactggtgctttggagttgagagaaggcaaaaaaagagtacaaaaatgtcaaagccaagtt
tagctgctcttcagctctccctttagctgctcttcagctttaccttaccatggttattagtgattgaa
gaaaattctaaagcactttttaaaggacccaattctgaagagtttagattcagagagcacaatggagt
tggagtgactcctgctcaaaagtttgagacaagcgagtccatgaaaagaccgtcctcctcttaatgga
aatacccaggttttctcattcttctcgccttgctttcagcactcgcagcccagaaagcccttatctaa
caggtactgccgttgaaaggtcattgacttgtacaaaaatgatgagtgctgaatagatgtgcataggt
cactgacagtatctgctacagagaatgagttttcgtatttttattaggatacacctaacatggcaatc
tactgcctcaaagaactctataggaggtaagtgaatttatattaatacagattgaattaaaggataat
ctagaaaaaggcatatgatgtaaaaaaatcagacacaagtatattttctgtatagtcagtttttacat
tgtgatttcaccagctggctgctgagtttgacggcttcttaacagccacactgctgagattcaaatgc
tgatagaaactttgatggaaaaatcactggagtaaatatttctaccatctgttgcccttcactgggac
cctaacgttaagaataattcataccattgcttgtcctttatatttccccagcagtaataaaatttcat
aagattttgttttgtggtcacaaagctatcctggtttctgtaactagaagacatacactagcataagg
gaatcagccggaaaatttactgctaagagaatttgtctctagtcacttactttaaggttacagcaatg
tgtaagtgtgggaatacattttaaaatgagcttttcaaagttattagctggtagtggcatgagagtta
agtctcttaatacagttaaacagttgggcacttcatccttgcgtaaatattgttacccttttattgct
gcttggaaactcctctgcaactttttggcccctatccatcttttcagaagtagtaaataaccaattta
ctgggagtgtggtaccaggcagaaattccgagaggggctttcaatccttgcccatcaagtgtatcttt
cagaaataagtatattaaaataattggataatttcagtggcttgttattagacttccgttgtccagca
tggcatgtttaagaagatgacagattttcatacattattggaaagaagcaagaacaaaaaaacataac
ttactgtagtaaccacggtaaagaactgcttaaaatgcaggataaacatgtcatccctaagggattcc
cattcttagagcatgaaattatcaagagagtaagagactacaaaaaatgagaagaatgctgattgcaa
attccaaatagaaaaaatcaaaacaaaactgcgcaccatcattctggaagcaatgagaagcagaaatt
gtcatttaatgaaatgtaagattaaagttaatagaagtaattttcatgaaataatattttgcaaggac
gatgttccagccatattgatcttcgtgttttcttttcacatcccttcttactgttccctagaatgctt
gtttctacctttaaatttgcttttctctctaccagagggctctaccctatctccagtttctcaccatg
tcccaatctactccctctcagaatttttgtacacttccctttatatatatttgtgctctaattttata
ttcacagatatgccttttgtaactcccccatcttaaagaaagcacacacgtacgcacacatgcacaca
cacaaaattgaactctttctgggagatctgcttaactttcttcataactctgtcacttgctgaaactg
tagtatgtgttttcatgtttattatcttttccattagaatgaacatattttgggtacttggtctttct
cgatcaccaatatacctcggtacgtagaaaaattgattcatatattgaaaatgtaatattcagtagaa
cgaataaatacataaataaatttaaaaatgatacttttattgtattacctgagacaaatgatccccaa
gtttgtccttgcttttcatagccaaaacattctctcttacattgagcttccttcacctcttctgtgta
cagagcacttaaaattttcacattgcctgatactttaacaatatgatggccctgttctcttacccatt
ggagcatatgttaaataccagaacccatgtaacaaacatatattgtgatcctactgtgtgcaaagcag
atactgcttgctgctaggaatacagagctgactaagagctccttttctctttatgagctcacagtctc
atgagttcaacgtcttaaggcacaacgtctaaagcaaagggcagtaagtaaacactccagaaagtact
ggatctggcctaggacaaatggtgggttgtttttccagctgttatttttcctgccccctaattgacag
tcctccattacacctctgggatacctagtctgacttgggaaaacctgactttgggaatcagaggcagt
ctctcttgcttatatatgaggaactctaatggatacttactgtcattagagaaactctgcttctagcc
tggctccttttgtaaagaaggttgagtccccttggagagcctgcagaacataaccatttgcatgtaat
gaacagtttgtaatactttgagattgatgtgcaatttctatttgacaagggaaaaacaattaggatta
accgtggtcgtatatcccagaataccaacgttgtttccacactctaagtgttgttgggtcattatatg
agattcataattttgtcctgttgtacccacgtttgcattaccattcagtcttaatttattatacccta
ttaaaagtttttttggtaatttgttcttattgctactcaggcattaaaatgtctgcaggctgtgaaaa
tgaataaatttaatgtggcagcatagttctcaaaatcctggctttacaactcatagtacaggcttgta
ttgtaaatcctagttaacatggatttatttgaaaatccaattttactgctaatcttaaataacacatt
tttcaaacattttatccttgaatttctatttttttataatttatggctgttgtatgtatttacaaaag
gacaatgtgtgtacttttaaatactagtaatggattgctgaaacaactgtaactttaaaacaatgcaa
ttgttaaaaaaataaactgtgcagcctggcttaatggaggcttatgaacatatgattaagatatatgc
tataataagcaaattcactcaactgatagttcataggaactttcaaatttaatctcataaccagtgct
atccttcaaagaatggtcagggcaatttaacgagtacatgaccacgcaagataatttcattgaagagt
ggctgaactgttgaaatattttctagtctccttgggatatcattaagagcagaaattttgaaatggaa
ttgtaatgatgttcagaaaagataagtaggtaactctcttaatacgttttgtgctgctgtaacaaagt
acctaagactaggtaataatttgtaatgaacaaaaatgtattggctcacagttctggagactaggaag
tctaacattaaggtgtcagcctctggcgagggcctacttgatatgtcatcacatgatggacgattaga
gggcaagaaagatcaaaagggggctgaactcccacttttataagggaaccaaacccactcgtgagggt
ggagccctcaatccttaatcacctcctaaagctcccaccccttaatactgtcacaatggcaattaaat
ttcaacatcagttttggagggaaaaacattgaaaccatagtagtgatactgactactaccacacaggg
cttgggaggctaccctagctgttgcacccaagagatgaatcttctaatgtgattacctttatcatttt
ttttactttattaaaatacttttattttacatgtatacttttgtctacccaccatttccatgtctgac
cactgctactactatgtcctagcataacattccatacatccttaaaaccaagcaaagggtggagttcc
atctttaaaaactaaacaggcattttggacaacacattcttggcaatggaatctggacaacatttatc
aaacatggtagggaaggttctcactctgcattatcaaaacgacagccagatatcaactgttacagaaa
cgaaatcagatggaaaatttttaacaaattgtttaaactattttcttagagagacttcctccactgcc
agagatcttgaatagcctctggtcagtcatctggaagcaattcttcacataattcatgaacttggctt
ccactttaggaagagaaccacctttttctatacttgcttgcatttttgctttaatgtcttctacagaa
ctaggtcctttgggtgttttaggagtttttccttgttttgaaggattcttgtccttttgatcttggtg
ttgacggttttgagtcttttccattccgatttgacttttgtgcatttttggctggagtatctcatata
gatttcttcactggcgctttttcttcagtttcctcatcatcaaaatcatcatcatcatcaaaatcatc
atcttcatcagcagcaagttttacttttttctgtggaaccttgctaccacctccaggagcagatcgct
ttccagatatacttatgagtttcacatcctcctcctgttcgtcttctgactctgtatcttcctcccca
gctactaaatgctgtccactcacatgcactggccctgaaccacacttcaaccgtaagaccactgatgg
tgttatttcaaagccctcaagggaaaccatgggctgtacagacattttcaaagctgccagtgttactt
taattggactgcctttgtaactcattgcctctgcttcaacaatgtgcaatttatcctttgccccagcc
cctaaactgaccgttcttaaagataactgttgctcaatttcattattatccaccttaaagtgatcatc
tttgtcggcctttagttcacaaccaaaaagatagttttggggcctcagaggactcatgtccatcatcg
tccatcaggtggcaggacgcacttaggtgggagagaaggcagatgatgataaaggaccactgctcaag
agaacagctgtgcaggacagaatcacaccagggagattacctttatcttagaaaacctgaacatcttg
tgtactttgacacttctctacatttcacctaacctttaacatcaacacatttattcagaaaactttta
cttttggagctgctctgtgtcaggctctatgctaggtgctcaggatattgaaattgatacaatcctaa
cctattcacatataatccaaggtttgctgaaattgatggacatttaaacaattgaaacatttaagtgg
tataattagcaaatggacatttaagccataaaaatagcatctaatagatataatagaggtcggtacac
cattgatgagtcagagcagaggcaacccaaagagtaactagccagaagaattgggaaagcttcataga
gagagcgatatgaaaataagggagagaattgtaaatccatgaaaatgagaaaaagttgaaaagtgatg
gtgtcagaaaaacttgtggtatgataatgacaagatgagaggaactcttggtaagcgtgttggatgca
tggaaagaaatggcacaaaataatgctgaggacattttttattttattgttggttttgttttggttaa
tttcattttttaaatctagtatgctagtgttcattgtccaaactgtgaatcataaactcagtttgtgg
atcaacaccggcctttgatttttagtgaaacaaaatagaaaatatcagcattcatcacaaatagatgt
ttcacagattttttgttttaattgcgactgtgtgtgtgtgggtgtgtgtgtgtgtgtgtgtgtgtgtg
tgtgtatgtgagagagagagagagagagagagagagagatggcttggatgtttatcacctccgaatct
tatattgaaatgtgatttccaatgttggaggcagggcctggtaggtgtgattggatcatgtgggtgga
tccttcatgaatgatccctttggtgacaagttagttcatgctatatgtggttgtttaaaagagtatga
gacctcaacccccacctgtttcctgctctcccctttgccttccaccatggttggttgtaaacttcctg
aggctctcaccagaagtagatgccagtgacatgcttcctgtacagcctgcagaaccgtaagtcaaaag
aaaaccccttttctttttaaagcacccagtttcaggtatttctttatagcaatgcaagaagggactaa
cacagttgtatgtgtatgtgtgtgttgggtgatttctggttgagtgtcacaaggttgtaatatggtga
gtgtaaggaagtataagttttagaaaattaagaagccagttcagaaaactaatacttttggaaaatag
tacaaaatcaactttacaagaatatacacagaaagatgtaatacaagatttatttcattgcagtaatt
tataaagttggtttagtgccttgcttttgcatgctgttttaaaaattaccaagaatatgacttcatgt
gattttgaaatactcccagcaagataggtagaaaaggtattcttataactcttagacaaaaatttcgg
aaagtttaaacgctttatcccaaatcataaagctaataaatgaagaatctgggattcaaacaccatat
tttttttactgttcatcagctagaagttagaaatgttaagccaaaaacattaagtcactgctctgcct
aataaatcttgaggaaactaataaaaagaataataccactgactacaggacaaggtcttcctaagaga
ccttaaatatattaagtgatgaagatgaaacttcttttattcataaaaatgttatttagttatgagta
gagctctaattaaacttattttatattgtcatcagtaaagttgagacataacatatttattaatataa
ttataatttgacccatagtgtattaaaagaaggatgttaaaaggagttgttattagagatgatgttag
ggttgttgatgataataacagtagtcataacataacaaagcacttcataatttaagaagtgccttcaa
ttacattgttactctcatggtaatctctgtttgatatatagatttggcggattctatatcactctaag
acataggttactgaggtgacggaggaatttagcaagcggctgtcaaatggaggacatgagcattggat
tgtgtatggcaagggctgatggtctctaagaaagcctcttggtttccacagggcagaagccctttgaa
gatcatagccaaggatttagtaattgcctccctttcagaataccctcaagagaaaagcccaccataag
acatggttccctacaggcaaaactgcttttccttaaaatttactgttccctgaatatcagccttcttt
ggctcattcaacatagttttcttaagtttcaggacagtgctgcagaccaaaagtttcaacattgagga
aaacaatactacttgtgcagtgaccctacctcagtcagggaggcagatgcctgcctttatgtgaggga
ataaggaatcaatcatatttccagcactcaagaaagccagtctagtgcagggagagatagatacataa
acctcaaagttatgatatagcataatagttttaaatttccataataactgtattttaaaagttttata
gaaacagaagagatgacctcagtctggaaaagccagcttggagaatggcaaccaatattaagtggcaa
aagctttgggatcccaggcctccagatggagggtgatagcatgggccagacaggtaggttaggaaaac
tttgcaaaggacattacacggtacacagacaagtctgtgttttagcctataaaccacagttgcagaat
gtgtttgagcaaaggcttttggggatgagatttgcacttttcaagatttaagtttgtttaggatactt
acggtttgctgtatacttcctgggtttttacattataattacggtttgaactttaaaggaaaactgca
gtttagcatacttgaaagagtgcaacttcaagtcatgattggagacagatatttaacagattttgtga
tcctgtgatgcttattttcttctcagacataccacatgacaatcatttttaaacagtttatttctact
ttagcatccatctgaaggtgttgtgtatgttttctgcttgaaaataaagcagtgggctgggtgcggtg
gctcacgcctgtaatcccagcactttgggaggccgaggcaggcagatcactaggtcaagaaatcgaga
ccatcctggccaacatggcgaaaccccatctctactaaaaatatgaaaattagccaggcgtggtggtg
catgcctagagtcccagctacttgggaggctgaggcaggagtatcgcttgaacccgagaggcggaggt
cgcagtgagccaagatcgtgccactgcactccagcctggcgacagagtgagactctgtctcaaaagaa
ataaaaaagaaaataaagcagtgaatgcgattaagatggatttattatgatcataaagtactcaggag
tcttattttaaaagacagcattactgtaattaaaaatatagggaagaaactaatgctgttttgcgtat
cattctcagctctctcaaaatcagatattaagctcttgctgccaaaggagactatactgcacggtgct
cacctgcataaactttgagagggttgaattgtgccaagcaattctctcaatacataaattaaccaaat
atttgttgacctactgtgtgacaagtattattccaggaaataagagatccagcaatgaaacaagtatg
gcttcttatagagttcccaaaaaggaaataaaaggatatacgtatagtgatatccctgaattaaattt
ctcttttgaaaataaaaattctatcataagctgtaactgccaacacttcaatactcattcagcagttt
tcagggatttgtaccttttgacttatgagaatttggaagtctaattgtatcattgcactggagtctta
aagaaacagataagcgaatgactttgcctgtatcattgttgactgtacttacaatcagaaaggggcac
aggacagatgccagggagtaagtggacagcccataaatggaatggtaagaaagaagaactatagtgga
tttggaaagttcccttcagcattttccctagacaatctttggctgtgtttgcatgatcagtatttcat
tcacaggatattgagctcttgatatagttctcaaaacccaaaatgaaataagaagtctactctttatt
taaattcaaattccagagagttaagtaactttccaggaggtaatctaaatatggcctccttgttgggg
ggggggggggtgtttgaatttgcatataaatagtctcacccttaaaggaaaaccacagatggtggtaa
tgatgtagtcataatgtacatctccacagtggtggaacaaaatatccacagttttgctttccccagtt
tcagtgacccatggtcaactgctgtctgaaaataggtgactacaatacaataagatattttaagagag
agaaagaaagatcacattcacatgattttcattacaatgtattgttataattgttctatttttattca
tgatttttaatctcttaactgcgccaaatttataaattaaaatttatcacaagtacatatagtttata
tagggctcagtactatctgcagtttcagacatccactgggagtcttggaatgtatcccctacagataa
ggggtaaaccactgtatcctatttgtgtgaatgctacaggtgttgtgagctcataacaatatgacatc
aacactgaactaatccaggatttggtagtgagagtgatgtatttgcaaggagtgagacgtggtgcctc
atccaagcagagaaataattttgaaatttgcctgacaataaaaatcacaatgtgaggtctctctttag
agctgcaaagtccaattcagtgccccctagccacataagatactgagctcttaaaatgcggctagtac
taattgagatgggcactgagtataacacacatgccagggtttgaatacttagaaccaaaaaggaagta
aatgctcatttattgcatgttaaaattatggttttattatagttgattaaataaaatatataattaaa
ttgacttcattttgcttttaaaaatgtggctatgaaaaatttcaaattatatatgtgtgtgattacat
atgtgtgttttcacatatgtaactgatgttacatgtgaaattgattgttacatgtgacatgtaaaaca
cgttacctaacacgtgcatatgtatgcaacacatatgtaacgtgttacatatataacacgttacatat
gtattgttacatgtgtgcttgcattacacacatgcataatatgaaattacatgtaatttcaaattaca
tgtgtatattttgaaaattacaaattacgtattttgttatttttgctttacaaagtcaaatttaccct
atttaataaagcatcatgagttttttataactagtaaactttgagacttttgtaggagaataaataat
gcttattataaaaactgattggaaaagtgagctggagcagggagcggaggaaaaaggactagagatca
cctttcttcccagctccgctcctctcccaaccttttttctttccattctctcatcccaattcaaaagt
gcagagttcacagttggtgtgctgatttagaaaacagatatataaacagccttaaattttctccaggc
ttttacaatgaaaagaagttcaatatcaaaagtaacaatataatctgtggaaaggtatagggggctat
gtttttgaggtagaaactataggtgctcctggccaagcatggtggttcaagcctgtaatcccagcact
ttgggaagctggggcgagagtattgcttgagcccagaagtttgagtctagcctggcctacagggtgaa
actccacctctactaaaaatacacacacacacacacacacacacacacacacacacacacacacacaa
aagccttgcgtggtggcgcttgctgatagtcccagctactcaggaggctgaggcgggaagattgcttg
aacctgggagacagaggttgcagtgagctgagatagcaccactgcactccgacctgggtgacagagta
agactgtctcaaaaaaaaaagaaaagaaagaaagtataggcactccttatatgcagctgctcacaccc
ctcctccttcacacccctcccccttcacacccctcccccttccccaaaatttgcaaggggaaaaatgt
gtgtaattggcagtatttagtggcgtgcaaccgtgagtcatcagactgcacatcctcacttctgctag
tggctcagtacccaacagcactcagtgaaaactaactcatttcaaaggtgaaaacaagtgagtttggc
caccagggagtgttcaaaactgtcagtgctgaagcaaatgtggagggtgttctgtagtttgttcaggt
tgatatttgtggtccaacccctagctgaactactaattattaatatctgtcttgatggtgcctcagga
gaaagcttctcaaagggaatcaatgttcaaattatagtaggtatcttggccatggaagttattgaatt
ttagccaatacttgctactctttcatttatagtgtgagaatgcagtgtaatgaacctgactctcactg
tcctgacttgcctttctcatcgcattcacaataagcacgtcaatacgtatacacatttcatatttcta
aagtttactttatttccttattgtacatcgctgtgctgctgatggaagagaaaaggaaaaacactatt
gattgcaaaactgttttatctttggtggcttagattttttttgtatgatatgtaacgtcttgcatacc
taaggcaacacgaagctaaatagatttgcatatagcatgtattttttccaattaaatgtttaattttg
ttcagagtatactggggacattttgaataatggagaaaagtacaaagaaaattcataattctaccacc
tatcagcacagtgaaattttatgaagaaacataattttcatgtaaatcatagtgaactcacggtaggt
tttatttaatacagtaattggagagctggtaggaagacaaaactggttcaaaagagaatacaagaaac
aaatgcttctataatgagtgaatttttaaaaaagtattctggaataagattagtgaataagatactaa
actcgttgataccctacagcctttggggttatatcctctactgggtaaaaagtcatttacatcatatc
agttttctaaaatttgcattgaacttcatagcgttgtaacatgtgtgggcccaaattaatagtaaaca
gtaagagttgctttactctgaaaatattgaagctcttgtgagggtgtgaggagtttgttagaaaacaa
cgctaccattattttgaaacacacacgatcatcttttgttttacttctaagttttggataatttttct
taaattatcttattatcttatccattttcttaatttccttaaccttttaaatgtttctcctaggcact
tttattgatttttggaatatagttgatatgtgctgaatttttatcatccagttttaattctactgaaa
aatctaaaagatgttcatcaactactatatttcaaatgcatacatcccctttcatgctaaagaaactg
tatgggaaacacagtctgacattttcaggacctggtatcattaaaagtcttgacactgttaaaattaa
acaacgccttttttaaaatcaaaggatacaaaagggctgtgttggtcagaggatacaaaatttcagtt
agataggagacataagttcatgagatcttttgtacgacatagtgactataattaataataatatgttt
tcgaaaattactaagagagtcgattttaagtgttctcaccgcaaaaaaatagtatgtgaggtaatgca
tatgttaattagctcattttagctagtccacatttttcaatacaatgtgttgtataatacgtgatata
tacaacttatattttccaattccaataagtaaaaataaatgtaaattatttgaaataaataaaatgtg
aagaacatccacttttcatatgaaaccatgagatattttctgttaaaagattaaatgtccaataaatt
tttgatgttaacagaaacaaaaatgtttaatatttaaatacatatttgcatgctattgaccccctgaa
gttcactgctgggctaagtgaaccaactatatcttaagtcaaaaatgctgaaattcttccccaaatcc
caaagctcatgaaaacataaacagaaaatttccaaataattctacagggaaaataagacacactattt
gatctgatcaaacaacgggatgattatggttaataatgagttacttgtacatttaaaaataactaaag
gagtgtgattggattgtttgtaacacaaaggagaaatgcttgaagggatggataccccgttctccatg
atgtgattattacccattgcctgcctgtgtcaaaacatctcatgtaccctacaaatatatactcctac
gatgtacccacaaaaattaaaataaaaaagagagggacccgaagataagctaatatttaagctcatca
tacttattaagataagcaatacataccgaaagtaatagcatttaaaaccagatgttgggggagggttc
taacttcttcattaaaattcaaagtcacctgtcttgttttttcttttgtttttgtttttttttttttt
tttttgagatggagtctcgctctgtcaccccaggctggagtacagtggcgcgatcttggctcactgca
agctctgcctcccgggtttacgccattctcctgcctcagcctcccgagtagctggtactacaggcgct
ggctaccacgccccgctaatttttttgtatttttagtagagacggggtttcaccgtgttagccaggat
ggtctcgatctcctgacctcgtgatctgcccaccttggcctcccaaagtgctgggattacaggcgtga
gccaccgtgccaggccacctgtcttgttttatcatgatcccgagagtatatatgtatgtgtacagctc
atctaaaccctttttctttcaacatgatcaatagattgaacattggagatattttataagaaataatg
aagacaactcaatcagcacatatatatattaaatgtggaatctataatgattgcgaagcctgaagcaa
actaaatattcagtaataggttctttttttccatggtatatccatttgaatatataacataaatgcct
tacatttgttttaactatttaaggtttatgttgttagtgtgatgaaatggctggcaaaagtcagaaac
tcaggaaagtttcaggcttatatctggagcctggttttctttcttcaaggtagaacctctgtgaagtg
aaaaattttttttatatctggagcaataatgtagaagcttaaatgtattatccaagttgtcataagcc
tattatttctttacattactgaagtgaaagacagcattaatggctaaatgccatacttggctataatt
tatattgtttaggactggaaatgagcctgaaatgtacatttttttccaaaatagttcatgtaatattt
gaaacctgacaagtaacctgatgatttcatggaataccatcaaatataaatgtgaagttttaaagaca
cagggaaatactcagaataaaccccctaaccacaggccagcagaagaactagacttgagaaaatgaat
gggaagatagatagtaacaaatgacttctttggcagccttatatatgcttagtcttatagactgtttt
atggatgctctgcactctatttccagcaagtatggcatttggaacaggaccacacgagacaaactatg
agttcacatttcccacaactgcacagatagaaagagggaacaacagaatactccctttcttcttgaaa
caataacttctgttgaagctcactggcttcttttcagctgtttctgctagctcctcctccgcctcttg
acctctaaggcaatgctcttcaaaatttcaagactgctttctaattgaaacaaaacttataagcacat
ttcttcccacaaaatgtacatttatttgtaaatcatatatgaatatgactaagcatgtaaacgtatgt
gaaaatagaaatcaataaatataaatgcaaacacaaatagaagcattcacagttttcttttgtgtccc
agtgagttgttccaaattcctcggaggtaggtatgtcacagtttgagactataccttcaatcctaggg
tttctggtttcgctctcctcctaggtgatagcatccatttctacggacttaactgccatctttagttg
aataactcctctatctttccatcccatatttctcttgattccaaacctgcttgttcacctgagcatat
gacacaattcattggctgccgcacatgcagctttgacattttatttaaaatctttccccttccccagc
cctcatctatttcacagtagtatcttcttcttatctacttgattggtaagcagagtccacatgattcc
atcatttatctcccattttatatctaatctataagcaagtaatgcaatgcaacttctgtctccaaaaa
tttattttgaatttgccttctcttcctctgcatctcccccatcttaggccaggtcacctctgccctct
tgccagattaggtcacattctcttactactgttgttattctcttcctattcaatcctacaccgcagca
aaatggatcttctcaaaatgtcagctagataaaggcatttctgtgcttaaggccctcatggatttatc
ttattaggatgaacacccaactctttattatggcttagaatacaatgaattacaacacataatgaata
tattatatttctatctttaccattttcttcttaagtcaacctttctcaatccatataggataatcata
ttagtgcttcctcactttctaaaacatctcagggcctttgcacgtgtttctctgttcttagacccaga
atgctcttccttttctctttgtgtagctaggtgcttctttccatttacgtatcacatgaaatgcagtc
attccctcctccttccctcactacctcacaaaaagttgatgcctctgttaaaccatgaatggaatttt
actcggcagtgaatagaggaaaaaccaatggtaaaagcaaccatatgaatgaatgaatgtcaaaaata
ttatgctgagccaaaagtcatagacacaaatatgggtatttacatgaagttaaagcacagcaaaactc
aattacggtaatagaattaagaaagtggttacctctgggtgagggttggaattgagtggacagaggca
ttagtgactttttcggggtaatggaaatgttgtctattttgttcaggtggtgaatacatagatacatt
caattgtcaaaacacatccatccaaacacttagacttttgcactttattatatgcaaattatgcctca
actgaaaaaagtttgttttcaaaattatatcaacagttgaaattcttttaaagatttgattcaaatga
gattaattctgtatccatcattgatgtatgatagttttgtatgtagttaaggttattggagataattg
aaagttatactcacaagaaggctgcataatatgaagtttatctgccttgatctttaatagctttcgcg
atttcaacttcttcacagctctgtaagaaggcagtgtggcatgttgaagcaagcatgtgttttagagt
aacacagagctggtatacaaccccatgtctaccaattatcaatgatgtgggtatgttgctggatctca
ataatcttccactgtgaaatggaatgtaacacctgactcacaacgcaaaggtatttaccttatgtaat
ataattcctgcgatcctgggacctcccttaatcccatccacagatgccaggttaaagaccccatcaca
gactagaacaagttgggatgtcaaaatgaataaatattaatcgaagggcctattgtgattgaacacca
cgcagtaggcactctctaatacctaccgtctccctcctttttgggggaaacattctaaatgtgcaaaa
aataaagggttatttgctttctggcacttgggatcgatttattgaggatatgttagcagaacagcaaa
ggtgaaacactaaaagcaccatcaatacacaggcagaggtgaagccataaagcctttattttttaaat
taatgcacaatatataagaggtatgttagaatgaacgtccaatccctgaaaggatatacgaaagacat
tcataaaattacatgggcatgttttcttaatgttcaaaatattgttttaattagtgtattatgagttt
attcatgtgtctgtgtgttgtgttatattaatcttttcttgcattgctataaagaaatacctgagact
gggtaatggatgagaaaagacacttacttggctcacagttctgcaggctgtaccggaagcatagcagc
atctccttctgtggaggcttcgggaagcttccagtcgtggcagaaggcagaacgggagcaggcacttc
acctggctagagcaggagcaagagagacagaatgaagtaccacacacgtgtaaacagccagatctcag
agaactcactcatcatcatgaggatggcaccaagaggatggtgttaaaccattcatgagaaatccaca
cacatgatccagtcacctcccaccaggccccacctccaacactgggaattacatttcaagatgagatt
tgggcggggacacatatccaaatgatatccatgtttaatcagaaaaataaaagttaacagtaacagtg
attttactttgtagacctttgctaatggctgaaatctagctccattccgagaacagcctgcggtacac
attttgaaagatagttgattaatatgaaagaagccttatctgtagtccttaaggccattatggtttac
atatatgagtaaatattccaaagtagccatgccagttaacatatatccagagtctaaaggccactggg
cgacaaaagtaaaagatacatagcaattgttactttatatcacagtaattcttgtatattttaaatgg
atatttgcatttgaggatatccacttaagagttaggtacatggctcttacatttaagtaacatttact
taaatttctggctgcagcaattccacataggtagaaatgaagtctgaattgagttgggggtctttgca
gtgctctctctgttcattggctattttgacaatgctgagagatgtggttagccattctttttcatttc
atattggcaacctagagagcaattaagccttctccccttaactagatgtatgttttactcatttctgg
atctttatggctgactttgaatcctagcctgtggtagaaagcatggtgtcagaaggaactatgagtta
agactatgcatacttggctttgagtcttgggtatcatacctccctcatagagtgaaggaaccagggat
tcttcttgaggcccagacccggcatccatgttaagaatacctgtgcaattttgcttcctgatatttaa
ggtgaaaatgcatgtttgggtcattgtgaggattatgtgagatgttacttttaaatataggccccctt
attatatgctctcatagtttcaggcaacacttgtcgtatttgtaacctcagttttaactgtaatgttt
ccatcaatgtccctcttacctggtacaggggctcttcatattcttggattacaaatctgtgaatgcaa
ccatgcatcaaaaatattcagaaaaacaatgaatgcctacctctgtactgatgatttataggtgtttt
tcttgtcattattccctaaacagtacaatgtaataagtatttatatagcatttacattgtattaagta
ttataagtaatctagagatgttttaaagtatataggaggatgtgtgtaggttgtatggaaatagtatg
tcattttatatgtcacttgaacatttgtggatttgctatccgtggggatcctggaaccaatcccccat
ggatactgagggacaattgtattataagcagcaagagggaaaggaatctgtctattttgcccaaaatc
gtgttcccgggacctagcatagctcctggcaaagagtatacaacaaatatgcattgaggagagaacag
agggaaccattatccccttattctcgctgttccttcatgtaatgaataaacagtcaaatcttacaaga
gattttaaaccagtcagagaaaagttggaagttagttagttgttcatacattgagaagcctcgacgct
gtgtcatctaggtaatgaaagatctagggaagtttagcagggagaagaagagagatgatagttgtctt
caaatgtttgaaggactgttacggacacaaaaatttaaacttgtgctgaataattccaagaggtacac
agtctctcgatagaagctaaagtggggggtgacatttgactcaacaaaaagccatctaaatatcagaa
ctttcaaaagcaggaactggtgcctcaattaatagtgtgttttctagcacttatgatacctgatcata
ggcaagataatgaaaaattgggacctgggagttatacatgggaatttgtttatcagttgggtgattag
gagaggtggccttaaagtcctgttgtgttctaagagtctgtgattctgagtcttatttcccaacaaga
gaggtacagagcagaagatgggattgggagaaataggataaagataccaggaaatcctaaaggtaaga
aaaggaaggcagacctgaagctaactctatacttcaggtgcttgcctagagccagccctacctactta
gagaatgttgaagagccagttaaaacatctttaacacggatgtaaaacaaaactatcaaaacctgaag
atttcgaatgttctaacctactcgtcagttgggcttttttcacaaatacttcagtaaataggcataaa
tttattttttaatgatagaaaatatctcttaaagaacttataactgtggataaaagcaccaccataaa
aatcttgtggtgaaatatatatatatatatatatatatatatatatataaaattttaaatatggttag
ctagaatatgacgacaatgtttatgaaacacagagactcttgacaagtcccatgtatacactataaaa
ctttaagttatccactattcactcactaagcttatacttaatgagtgtctgctgtgtcacttattgcg
gaaggcacaggcggtatagcattgcacaaaacatatgtggtctctgatggagtttttcagtctagtgg
tgaaagcagtgaatgggtgtacagatgttaaataattgtacaattagttgcatgtgtaaacgtcaaag
ttcagaagatgacaattgatctacggcaatgtttctcaatctctgacgttttgagccaaatacatctt
tgttgtggtggactgccctgtccactataggatgtttggcatcacaactgacctctgcccattagatg
ccaatagtactctcttctttaatcacaaatttgtcccagacatttccaaatgtcccttggggagcaaa
atcatccctagttgaaaatcactggtctagggggaggtctttatgaggaagtaacatctaagaaagct
ggtatgtttacatatagctacagtctattacacatgtatacatatgtaacaagcctgcatgttgtgca
catgtaccctagaacttaaagtataataaaaaaaatgtaacaaaacaatacagtatgataagtgctat
gggaccaaagatgaaagggttctactgcacagttatgaactcatagttaggcttttggggtcaaaatt
ttgctgaagatatttgccacccacgtgacctttggcaggtgacttagcttattcatgcctcagtttta
tccaatgtgaaatggggctggaaagtcccatgtacttcctaataactttgcggaaataatatgtggtt
atataggaaaaaaaaaaaaatcctagaagtatgcctgctgcgtagtaaaaggaaggagaaggataaag
agaaatctgcattttttcttctgtaatggggcagatagtaaatattttaagttttgtggcccaaatag
tctctctcacatttacttgattctgcagttgtggcattggaagcagctatggacaatacttaaattag
taggtgtgcctgtgctttcaataaaattttataaatacaaagtttgcaaaacaaagttgttttttttt
tttttgtagtttgctgacaccctagtaaagaagcaccattgtcaacgttaaaaattatcaaattttta
tttttcaaagttttcaaatttgctttgcttggtctagctcatgaaataagtcaaaagtagcaagacct
ccacctctaaaataataatagtaatgataacctcaaaaggaaagaagaaatatttttaaagaagaaaa
attattgttaaataggattattgtgcagagaaaacctaggagactcaattttaaaatctgtgaaataa
ttttaaaaatactttatgaatagatacataatagcttttattcatattaatgactataaatgcaaatg
gaaatatttcattcacactgatgacaatgtataaattaaggaggaataaaaattgtagaccctatagg
tgaaaagcataaaaatatacataagaaaaagcaaaaattgactacgtaggattgttttaggatttaag
atttattgtcattaaacttgcaataccagccaagttaacatttgaatttaatacagttataatcagaa
tgcttttgatgtgtttgggggcaatataatttcaaaggaaataggcaatgatgtaatttaaagtttat
atagaaggaaattgtgtgcgtgtatgtgtgtgtataaattggaaacaattttattaataagcatatta
tggcagcaacatacacttccagatttctactatactttgaagtaattgtgatcaaaaccacagtgtgc
tggcataaggctagagaaatgggttagtggtttacaagtgagagtccaggaaaacatccaaataagat
tggatattttagttctgtgtggatagcctatttcacttaataaatagtgtctcgtaattgactattca
tgtacctataagtttaactatagaccaaaaaaacgccctactagattaaggagctaactagaaatata
aattcatataaacaataaaggaaagtgtaggactttataagcttcatgggagacagatttttggtaag
tcaggaagcctggaagacttaaaacataaaattggcagactgaattaactgatagtttaaagcttcca
tagagcaaaataaatcataaaccaagttttaaaatatataatggatttagagaaggtatttacaaaaa
tatatgactaatggaggttaataataacaatatgtaagaaggatatgaaatggcattttactataaag
gtcaaacaaatgacctataagcataataaatcatattaatctccactagtaataactacacacatcta
cataatatagatgttacgcctgcatttgatttactttatctgtcttttggcagaactatttgtcacca
gataaaaaattctatatcattaccagaaaggtatattattataatgtttattatgttgcagttgtaaa
agaaataacagcttttcaattgtttacaaatcctatagaacatttactgaaatacatttacattttgt
ggcaaacttggatttaaataccgtgttcgtgctttgttttatgccgttttcccatcttttctccagga
atttgattgtgcttcattgaaagctaaaaagaaaaaaaaaataattctggttttggtttaaaaaatta
ggttaggggttaaaaagttgtacgttgtcttctgtaaaaataaaaaacaagttttcttttgttcttgg
aggctttatattaaatggatttttaattcatagacagcatattgtgatgaaatttccccatgagcttc
acattttgtttcaatagcagaaactaacttggttgcagttactgcccttctgagaacagtgttctgga
ataattttgacatacatatgtatctctttttaaaacatgtgttaatcttttcataaagaaagttttcc
cagctgtgtcacctgtgactccaactttctggggggacagggatatgagatgttggaagggaatggct
tgaagaaataaagtgcaaaagacgtaatgctttcctgtggtagaaatgtattcagtgaccctgaatga
ccttcctactcttgtcccttcatttttcccacaagtatggtctgggcaattataaaaattgacatttg
cagtgggctcttctgtaaaagatgctcaatcagaaatgatttattttagaaaaagagatgatataaac
atatatatcccctgtctcggaagtgtgaaggttgaaaagcaaggagatgatcttcaaagtgtctaaaa
tattgatttgtaacatcgttttatgaaagtgcttcagattattttttttcttggatggccccttatgc
tttggtcagttgatgctaaaatctgaacttctttattttaaaaaaaacttttaattttgaaaaaggaa
gttcacggtgctgtctaattctttttagatagtcattaatgtaaatgtaagagtcattctgagaacca
catctgctgatatgttccgttaaattacaagttctatgtgtatttgctttgctttcatacaatgaatc
ttctttactctcttccccacctgccagaaattgccccactcaacgttcataaaaggtccattttcaat
cgctatatttatttcagaagcagagatatcatatattcaaattttagttactttccaatatcaagcta
ataactcacacaaataaatcaaactacagcaaaacagcaatctagcattcaacaaaacctccccaatg
cacatatttcaagctgtagatatgtatcatccaccatgctgaaataatgtacatgttcaaatcaaatg
gaaaactagaatcaaaattgttgattacttcttatcagggcattttattatatttaagaaaaatacaa
attaaatcattttcaggaagcaatccttctggctaagatttttttagcataatgcttaaagttaattg
ttgatctttatctataaattcaaaggtggactaaaaatgcagaatcaatcaggtagtccattttgcat
caggtgaaatatataaagcataaaacagcgagttacatttcctaacaaaattgaattacagtgagtaa
aagtgacaggacaaatgcattaagaaaagatggactgaaatggatagagtagaatatatgcatctata
aaacacagtcatatataatacactcattttttttcttacgagtgtgagattaatggaagaaaacaaca
ataataacaaaaccagtgtgatgtgtcagatttcaccttttaattaaaaaattattcacttcagaggg
gaattttctttcttgggttagctcaatcatgtcagatcttgttcatttaaaaggtcagtttacttgcc
ttctgaggtttttgtttgggaaaagaaaaagaaaatagattttcattggtatcctgggtagaattaat
tgtttatcattcatttttaagatctccgagaggcagaaaaaggggaactgtgcaacccttttgtcctt
ctggatctcaaaatgaagggatacattctgctacatgaaatgtggaattaagaccatgatgcaacatg
ataaacaacacaaatttgggggtgtctctgtgctatacattattgaatttttccatgctatacacttt
ttggatgtgtctgtgctatttattcagtttttttaaataaaagtttttgtagactaaattgccctctc
tactttgcatcgtttttgaacaaaggattttcaagactgataagctcaaatgtatcatttattgtatt
caagtagcattcaatttttctttagaagtataatttgtagatattttaacacagaaaacttgcaacac
tgctcatgataggcacttattatatattttttgaaagactatatggataatgattctaactttgactt
ttcctgttttgccttcactttagaattaagcagagaatcaaatccatattcctgggggcgatgcttgg
acaacagtatctctttaaagatctttgtgtgagtcgaaggtgcagccagactgggagttattgtgaag
aaacagattcaggaaggttgagaaacttgcctaaggctaatcagatagttactggcaatgttgtttct
aaatcactgtttggctccctcattcaatgaatctacactatgtgggactgcctcttgctcctgacatc
ttttgctgctgaaataaatgaactcaaagcctagaaggtagaaaagagggagttcagaattatattca
ggcacaaataccaataaggctattgcccccagaactgcaacttctcttggtttaacagataactattt
agctgtgaggtacaactgaggaagtggacacacaagttatcaggagattctgatgtgccagtttatat
ttcttgtcacaggtaatgattcgaaatttcttaaaacagctgtcctcacagtggagtaacctgggagt
acatgaaggcattccaaggagtaggcacagatagttttaagggaatttatttctagatcttctacttt
attttgtactcttcctgaaaactgaattgcctgaaaaaaaaaaaaaaaaaaaaaagacatctgtagtc
aagacctcaggctgtttctcctttctaaccacttgccttttctaaccacttctcccaatttaagaaaa
aaagccttatatttcatccaactctgatcttactaaggcttcaaacaaaagaagcatgaatgactttc
atgacagggcaacatagctttttgcaagaagagtggttgctaactctttgctttcaactgaacccgaa
gagaagacctgataagttgtcagccgatagatcattaaaaatacgttttggtaagcaatcatcatgta
cttttagcatatgccatagcaggagcacaaatgattaagcaatgctactataatacaattccttccgt
ttctttctactcacctatttgaataagatttttcatcatttacatctatacagacaaaaattagggat
agaattgatgctgaagcctttccaattgtagaattaatttatattcttctgaaggtgtataaattgtt
aaatacccatccatcttattaagagatgtattttcaataaaattttatttttatgtttatcaaatttt
ataatatacatatattgttttggtcaattgcacgttaataattgtaacaatacctcaattgaaaaggt
ttgttttttacatttaggacttacagtaacagaaaaaaaacactcattgtgtatacatactgtttaag
aaaagtatactaggtgatcaataagattttttcaggcataaacatatatcttagttttaagatatcga
tatttacaatctccctcaaattatattattttcagtcatttaagaatgaaaagtacatttcgaatgcg
gattttaaatctgcaagggttgactcatttttcaagagtctttttaggggatacagaagcaagaatgt
ttggagttccctgatcagtatctttaagagaaggtatttgttggtagttcctagcaaattccaacagc
ctgatgctacttaaaagataatagtaattattttaaataatgcttctgataaaaaacattcatgcaca
ctcagtttaaaaagatatttaaacatttgtagttgtagtttgggaactcatgatacaagtacagtctg
taaatgaagctcttagtttgcaaatatcagagataagctattaaaatgcagaaattgaaattgccctg
atatatgcataaattagtgtcatctccatcttgtcagttagagtattttttagattctctctatgtat
acatacatatatatatatatatatttatatatatatatatatttgtgtagctgtgcatgtgtgtattt
ggactaatgggtcaaaggacagtactaacccaattcaataattaaagaaaacataattttgagaatta
gctttatggtaattgtttgacttaaatgagtagatcagagaagaataagggctttcccttatttaaac
aagcttcatttttttatccaaacatttacttagctgattaagcttcacttgtttattttcttcaaagc
attcattcaggtgggtactgagtaaactgaaatatcacaccagggaacttcaacaccatccaagtctt
aaaggcttcacttgttcacagttggcatttagtgaatgtctaggctactgataatattgtgagtaagt
tggcagggatcataagaaatgataaaatacagttcttgaaaatgttatggtttgaggaaaagatctat
gtttggaattagactgacttggattcaaactctggctgtacctttgggacaaggtgttcagaaactct
agcctatgttttttttctgcaaaatgatcctcttttccaggattcctgtagagattcaaagatatgtg
aatgtttagaaaaagaatagacttttgatcattgttaattcccttactttccccaattagacttgtaa
gactgggaagaaagctacacaaaagattgaacaaattatagctgacagaccatagcaaaagatacagg
gcaaaacttaaaggggaaaactacacattaaattattttaaaccattaaatagcactaacttttgtca
gatattacaaccaaacaccactcaaattaaagtaaactgaataaaatgcctgtttttttctgtttact
gatgttttcatttgcttcattcatttattggaagatataaaatgtgttagacactgttaggtgctgag
tgtataaaaaaatcttattaatacaatttaaacacgcacacacatatatatggttataacaattgatg
ccatgtatgtactgtttatatgcctatacattattccacagacctggggggagggggatgtagagtct
taccagaaccataggaatcttctcacatcaacatttccttttgaagtttgttcatgaggcaccatcca
gataatactaccatctgcaatgtggcttgagaagatgttagatttttttattacacataataaggctg
taaagtatttctgtatttaggtagaggtatgtaatacaatatgtatataaaattacatatccaataaa
atctggtgttaaataaggactagcttctatgataatatagtctaaaggcttttcatttggtgttatag
aaattatgtgaaatatgtttcctggagtagaattattcgcatttcagctctctgacagtggaagaaaa
gctagagggagaggtgaacaagagagggagcataatggacaaagctttgctggaagccaaaccaccac
ttcatatgtcaaatctgacaggcctcccattttaggtgtgctgtcattgaagctttcagctgcacctt
gcctgtggctaggctattttcaaagattaaaatgcgaaactggaaattaaatgcaacttaattcccaa
tttaaatttccattatttttgaaaagtaaaagattaaaagaaatgtataattgcaattctggtggaag
aggtaattataggaaaggtgggatgtatttcaagtgggggatatagcttactgcagcagagaggaatc
taagctatcattcttttgaaattggtctggaaatatgttttcacatggaaaatatactatatttttag
gaatttccttgtcatattactgtatccttttctgttagaatataaattctgaattccctattccactg
tagatctgcctccgattatattagctcttctgaagttatcaaaaaataatgagatatacaatattcca
tatatgtcaaagcaattatttttaggttaagtaataaaccaatgacctttaacccggtaatattctgg
gttgttcataaaaaaactatattcaggtaataatgtctttccacttaagcaactgaaaaaatacacaa
tacttaacatttggttaattaaatacctactccagacaaaaggattttctgttttcaagttatcttag
caagctgagcaggaagcaatgatatatccaatcagaatatccatggaagctctgctacagtttcaaaa
agttctcatcaggcagcttttaaaatgcctactctgaaaatggtccaggttaaagaacaacagcttcc
tcgtcagatagcagtattgcttggccatgtttcttcctagcacaaaaaagtacctgctcttctctgag
tacctacattctaaggactatggcttacataaaacagcatgggttggggcaatttccagcacactgct
cactctcgaaaacgtatgatgcaggtgagagtaatgtttttgtttgaatctgctttcactcgtggaag
atgaaactacttgcaaagatctgtactttagctattatgagtaacaaaagactcctaaaatattgcac
acattgtggggatggagaaccatcatcctgggatttgatggatcctatggtttggctttgtgtcccca
cccaaatctcattttgaattgtaatccccacaatccccacatgtcaagggagagagaccaggtggagg
taactgaatcatgggagcaatttctcccatgctgttctcctgatagtgagtgagttctcacaagatct
gattgttttataaggggctcttcctgcttcactgggcacttcttcctgccacctgtgaagaaggtggc
ttgctccttctcaccttatgccacgatggtaagtttcctgaggcctccccagccatgctgaactgtgt
gtcaattaaacctctttcttttataaattacccagtctcaggcagttctttatagcagtatgaaaatg
gactaatagagacgtgtctctcagaagtcacagtgatgcttgaacggatccagagctccttcttcagg
aaggtcccaactcattctgaagggtctctccaagcccacctctctctgtaaatgggaaaggttttact
ttgagcactaaaacctgccagaattctcaattttcctaacagtgtgttaataaacacctactcattta
gtatccaaaccaggtctgtatttctcaattagagctcaccaggctttcatcataaagtagagcttcaa
attgtctgcaatcccactcctatcaaaaacctagaaggaggtaatatttcagagtaatactataacca
gatgaccacatctaagaaactgctgaccctacgatgtaaccttctgtccatttttccctttggaaagt
ctaggatcttttcttataccagcaagttacaagcctggactacactaacttgctttccgcagaagaaa
acaccatgagttctgttttcatattaagcacttagtctccatcagacatcaatcgagaaaaaatcatt
aaaaatcacattttatatttgatgtatatttctcaataatcctatgtattagttcattttcctactgc
tatgaagaaatacccaagactgggtaatttataagtaaaaagaggcttaatggactcacagtctcaca
tgactagggaggcctcacaatcatggtggaaggtgaaggggtagcaaaggcatggcttacatggtggc
aggcaagagcgtgtgcaggaaaattgccctttataaaaccatcagatctcctgagacttattcactgc
cataaggacagcacaagtatttagctccctcagcacagaaccatccccgtgattcaattacctcccac
caggtcactcccatgacacatggggattatgggagctacaattcaagatgagatttggatggggacac
agccaaaccatatcatcctatttggatgatcaatattatcaaggtatgctcccctgagggggcgtcct
ttttaccatttaactccaggacaaaagtttatttctttgtaaggacagtgtttatttcttatggtcct
attttctcctaagatccagacaccaaaatggccatctatcattgacttaactcctgaattttgcttag
agtaacagatttagtgaatctaaatattttctggctgtggaatgttaatttatacatgttcaagttac
ctttgattcatgtgacagtttgtgccaaaacacactcattatcagaactcagatcattatgttggctc
ttgttttcgttactaaaggaagaaaaacagtttctcaaaaagaaaattctgatacctaggaagaccat
tatacctcactcttttctttatctcatcaccacatccaatattataaaagaacttacaaagtaaaaag
aaaggtgttctgtagatgtagcgcctggcttgtatggtagcttaaatgaacacagctaaaaatatttt
atggctagtgtccaaaacagtctggcaccagacaaaataagaatatttaaaattatattttagagtta
ctttaagaggaagggagagagagatgtaggcaggaggaggaggagcaggaggagagggagagagagag
agagagagagagagagagagagagagagagaatctggggtttctatggaagggctaagaatatgtaga
aaacagtttacaaagaaatatggtccaagaatcgtgtgtacacacacacacacacacacacacacaca
cacaccccctggaatatttttcagccttaaaaagaagaagatctgtcatttgtcccaacatggatgga
cctggaggaccttatgctaaatgaaataagccagaccaagaaagaaaaatattgtatgatctcactta
tatatggaatctttttttaaaaaaggtcaaatatatacagatagtgaattaaacagtggttaccaggg
tcagggtagttgtgaggaaatggggcaatgtaggtcataggatacaaatgattaaaatatattaatat
attaaaagatataatatacatcatgaggactacagttaataatagtgtgtattcaagatttttgataa
atgaatagattatagctgttcttgccacagagtgaaaaatgggtaactgtgaaatgatagatatgata
atgttctccacaatggtaactattttacactatatatataaatatctatgcatcttacaccattatgt
ggtatcccttaaatatatacaataaaatttattttacaaacacatattaggaatgcatattctgattt
ttaacaatagttaacctcattaatatatttcacactatcatttctagtgtacatgaaaagtagtttat
tgacattagttgtaaaaaaaaaaaaaatggtcttgagacttttgggtcagagaatgttctggccataa
ggtaggtttctgcttgcctactagatatcttaacttcgatttcctgaacatcccatcacttcagaatc
tctcaatcctttctaacatccgcaacattgtttttctttctgcatttcttatattgactgatggattt
ataattcactttctctgaaaaaccctgcagttatcatatatccctatccattctggctctttattgcc
caaatctctaccaaaatcctgtcagcacagcctctgaaatatttctcaaagcatttataatctggctc
tcatcaacattttcaacactctgttttatcattccactattttacatcatttcattttcatttttacc
acaatcactcatccaacaaataagtatttagctccctcagtaattagtattattattattaattataa
ctagatgctgagcatacagaagtgaacatgacagacataatcccagcagggatgtcagactttatgca
agtaatcaaccatgatgaatctcatgagattctgagagagagagagagagattgagagagagagagaa
aggggaaccactggtgtccgagttagaaatttgaattagtatctgggtcaccaaaagcttctgtgaag
aagtgatatagacttggccacacaaaactaccgtgaaggtggtggaaatttttctatgcagagtacca
catttaaagagctaagcctgagagtgtcagagataaaggaacagaaagaatgtgacagcagattatgt
ttggaagaaagatgttcaagagaccaagctaaagaggagatggggctagaacctggagggtccttcgg
gtcctgttgggagttttttctctgcccagaagggctttgtcacgtggttgtcaggaaagagtcatgat
tagagctttgattcagagacttctttcgctgaagtgtggagaatggttcagagagaagcaaatctgaa
tggacaaaagaggttattattgtaatcttggcaagaagcgatggtggtcttgactaaaatagttctag
tgagaatgtgacaacaaacctgagaaaaatacaggagacgtaattgacgggggttagtgttaagttga
acgattgcagagttgaatttgaggaaagtgtcatatatcattcccagtttctgatgtcatacacctct
ggagataacactgccatttcttttgaaatgggaaaataataagtgatcagtaagtacgtattggataa
aataatgaatggttaaatgcataaggggagaggaaaagagttgcagagaaagagagtaaacgtatttt
ggatgtgttaattttgagatacctttgaaaaatccaagtgaggggttgggtagtcagagaaatgaatg
tggatgtcaggacgaaaggtgaccgtgatgaactgtatgtcttcctctaagcacgttatacagcttca
tgtcacaagtgactcacttcatgtcacaagtgactcacaaggtcacttgtgacaagcatttgcctggt
gcttcatccctaacctccctttctatactcagctaaaatgtcacctacaatacttcttccttgactcc
accgtccccactttactgatatgaatacattttaataaaatgatataataatgcttagtttgtaaacc
taatgttcctcaagtggtataattatctgatttgtatgtgatcatcaacccaaccatattaggagcac
cttgaaggtagaagatttaggttcatgcttaacaccacatctggaccactgtggatttaactttctac
aatgattgtattcattaatatattgggtgcccactatattccaagtaatatcctgcacactacgtaca
aggaagcataggtcccgtgtgctcatgaaactgtaattttagtaagcagggataggatacaaactgag
aaaggaaaacaatttagaaagtgggaaatattatgcacagaattaataaaaaagagaaaaatcttgaa
aaagtcttcaatacctcacttggaaggtgattttgaagaagaactgatggacaaactagagtcagcca
tgtaatgatgtaggggcaaagcattccgggcacaagggacagcttatgcaaagaccttaaaaatgaac
tagctttgtatcttggagaaggataaagagaactaaggtatctataaggtaattaggaagaggatgag
ttatttagtcccttagtctttgaagcacattatctcatacttcaattgagtttattcttagtgtcatt
cttctggatgcaatatttgagataaatgtcttaatgaacgttcacctccctccgtagtaatgcctgag
tgtcacaaaaactttttttgtttacatacgtagccatctaatggaaacataaaataggaatcaaaagt
tgagtttcatgtacaaaaggtaaggactgtacatgtggtcataacaacttcaaaagcacctgaaggta
acctttaaggaagatacaaaggctaggaaatatctaggatccatgaagacagacttacttaaggtcat
agtgtgtccagagttggttcccgccggtgggttcgtggtctcgctgacttcaagaacgaagccacgga
cctctgcggtgactgttacagctcttaaaggtggcacgaacccaaacagcgagcagcagcaagattta
ttgtgaagagcaaaagaacaaagcttccacaacgtggaaggggacccaagcaggttgccgctgctggc
ttgggtggccagcttttattcccttactgtcccctcccatgttccatttctgtcctatcagagtgccc
ttttttcaatcctccccacgattggctacttttagaatcctactgattggtgcattttacagagcgct
gattggtgcgttttacaatcctcttgtaagacgggaaggttcctgattggtgcgttttacaatcctct
tgtaagacagaaaagttccccaagtccccactcgacccagaaagtccagctggcctcacctctcaata
gcattaagaatatagtttcacgagcatatatgaatcaaaacttacatttgccaattttatttgcttgt
ttatgtgtttccaacatgtcttgtcttagggccaaatgtttccctagagaataactattccaactatc
ttagttgctgtatttttatgcaaccttcaactctccatactaaaatgtctccagaatagaaaataaat
cttttcaaagtttcaaaagaggctctctatatattccccttaaaagtaccaggcagacatatttctag
gtttctaacattgcgtgttgccaggaagtatatccaaaccatcacaagttattcatgtaaccaagcac
acttattggagtgcttctgcttctgttcttgcttgaaattggaagctccttccaggaaaaaaaaaaaa
tatctatagaaggggaaaaaagtaattttactttgaaaataaaatatacgtgagcaatagttttattc
tgtttttaatttaccatagcttccaaagacaacattgttttatagtaggggttagcaagtgttttctg
taatgtaaacgtaaagggccagagagtaaatattttaggctttgttttctatactctgttgcaactat
tcaactctgctgttagaatgttgaagcagtcatagacaatagagaaatgaagatgtgtcattgtgatc
caataaaactttatttacaaaaatggcaatgggctagttacggcttgagggctgcagtttgcagactc
tcacttcagagctaacagttgttgtcaggagtcacttgtttttggaaacctacaatgaggtactataa
caccaaaaagagttatcccttcctttttctctctcactttttgaattatgagaagaattagaaatgta
gttaatgataatgtccaaccagtgtaattatacttgttagaaacacagctggaagcctgttgtccagt
cttatttctcctctgtgatcctcattttcagaggttgaagtcataagtttgccatgtctactttctga
caggggaattataataatgtggagtcaccttttgtttgtgactttgacaatgcttcattgacttactc
accaattttctaatttttatgaagactttttgccgaaatgtagactcagtcttctctcttgtctactc
tttctataacaattaacaatgaacttatttacctttttaacatctttttaaaaattttctatacacct
tgaaaatgtgaatacaaagtaatgctgcatcatgtatattgccttattcacacatagcctcttatggt
atatcatataaaaatggaacaatacagcaacaggttgaatgaacagtaatcaggtaacaggaaaatga
gatgtctttaatatttcacttaaaaactcaatttcctaaagcatacatataaatatttggaagtatag
ttagaagaaaaatatctttaaaatattttaattgattagtcttatttataagataatttttaggaggc
tggttgcggtggctcacacctgtaatcccagcactttgggaggccgaggtgggcagatcatgaggtca
ggaaatcgagaccatcctggctaacacggtgaaactccgtctctactaaaaatacaaaaattagccgt
gcatggcagcgcatgcctgtaatcccagctactcgggaggctgaggcaggagaatcacttgaacctgg
gaggcggaggttgcagtgagccgagatcgcgccactgcactccagcctggtgacagagctagactccg
tctcaataataatcataatcataataataatttttaggaagcatcagaaatatataagaaaaagatta
ttttcttaattgctttactaaaaacacctctatgatttttcagtaaaacttgattcttatgtcatgtg
tgagtgtgatctgcctctcttgggatactactgtactcatgaggagtgatttttttctccaacgacct
ctttgtcacgtcaacaggtcacaggaatagtgtaccctaaaaagccacctgccacatgctgctgaaaa
tgtaaaagtacacacatacacacacacacacacacacacacacacacacacacacaccaaaatcaggt
atcacaagctgaaaataaaattgagtccaatttttttttaattgagcagttaatgtccttaaaacaaa
atcctatactgcaacaaatacttagccagatcattctgatacctccaaactgtggtgtattccaagat
acctctatgatctttgatttgatccacagcttttcagttatcatgcaaataccttcaagttttatctc
atttctcagtgcaaactcattaaaaattttcagctgaattcaattttataaacatgttgtgaatgtcc
tctttatataagcaaggttgtaaggaactggccacataaacagaaaattgaataacatatggtttctg
gccttagtgatctcatgtgtgagttaggcatatgggcaaaatcagaacactatagagtataagtctaa
aatggtagtattttataatagaggatgaagagggtgctgtgggatcataggtgacagatataactccc
gttgtgggacttgagaaaggcttcacagtctggaaacatttagttgctattgaacacaaaataagact
cactgttgagagaagggagagggagggcatttcaatcaaattaagattctgtggcatattcggaaact
gatgtttttaaaaagagtaatgtttattacattcctctacataaattatatttctatgtaatatgaat
gacaaatatttaacacaaaatgccttataacatttgaatgaaatccatcatatgacctgttatctatt
tccatttcctttttgctcatatcattatgaacaatgacctgataaattttttataagactttgctgaa
ttagtaaaggattattaagtttagaatgaacaaagctgaccaatcattcaggcaaatttgaccgtttt
gttgtcgcttttcttatttctgaaaccatacaattccctgaaatgaataagtacatatttgataactt
cctaaattaaggctcaaaacactggtaatctactgggctttcatttgttccttctatttgtctaatcc
tatctatatttctttatatgagctatgaaaatattagatttattaagttgtcctttatcttaatagag
aagaatgtttttctatgacattaagaggaatttgatttttttctttaatgatctacttttaattttgg
tagagtagcattgataagatcaatattacacattcttaagtatgcattacatgttgataagataaata
ttacacttaaaatatgtttatcaaatgtatgaatgataaaaacgaattctgaaatgtatgggaaagat
cttgaataaaggtctatgtacatttcaaggatgtctacatatgcaaattatcataatataataactat
tgaatatgattatcttcacatactttctttatttttcatctcttagatgaaattgggtattgttttct
tatagctggaacaaagcattacagagaattcttagtgtgatttcattgaaactcactgttatatgagt
tcaacaaagtttaaattagtccatgacttaatcatcctttataaatcctatcactagtattcggtaag
gacaaagtcaattaaaaaattagcaacagaagcattaaaagaaggattaataaatacaaaataaggga
tgtgatatctttacgtattgctgagatgttagtgctaaggaaaaacttccctgttcataatgtgaggt
gggaaaaagaagaactattattgtatatttctcctctctaaaactgcctatctgactgtgtttttctg
tgtcagccgtattaacagatgtttaattttactcactttagtatataaggcatcataatgtatgaact
atttcaaaggccctatgatggctaattaaataaaaatatattaaatattagctggacaaaataaaata
tgtattaattttggaaaaagtagatcaaggttttgcagatcttttcatatcaatatattcatttgctg
aataagcttttattgtttaccaatattactagttttatagagatgtagatatcaccacagtatgacta
attttatagggacacagatagatagatgttattttattccaatcttatttttacatataacaggtata
aatatgcgcttgaaaggagtatatcacttaggagtcagtcagaaaagtaaagatcttctagtctaata
cagtggttctcagccaggggtgattctgctgcacgctgagggataaattggcaatttctggagacatt
tttggttgtgacaattgcaggagtgttactggtattcatttggtagagacagagatattggtagacac
tgtacaggacacaggaaagtctcttacaacaaagaattattctgtccaaaatgtcagttgtggtgagg
ttgggaaacactggtctggaagaaggaatttactatgaggaactagttacgaaagtatagagacattt
aacaagctgaacaaaggatagtgagatggctcagagattagcaactgtggcatgaagccactactacg
tttaggtaaaaataagctaccatttattcttatagtaataataataataattattattattattattt
gagatggagtttcgctctgttgcccgggttggagtacaatggtacaatctcgactcacttcaacctct
gcctcccagattcaagcgattctcctgcctcagcctcctgaatagctgggattacaggtgtgcaccac
ccctcccagttaattttttgtatttttggtagaaacggggtttcaccatgttggtcaggctggtctcg
aactcctgacctcagatgatccatccacctcagcctcccaaagtgctgggattacaggcatgagccac
cacacctggcccactctttcttttttaattattgagaaatataaaaatatgtcaaaagtaacaggtgt
ggtggagttacagcatgcacataatgggatacagcccattatctaatctcagatggaaactagaaaaa
aaagagaagatctttgctaaagcacagattatgtggaaaatcatttagaaaaatagcttatcacaaca
ttaaaattaaatcctttagctgatcatttttccttcctattttttcttttaaaattgagaagacagtg
agttttttttctttattgtcattatcttgatgtcaaaaaataatatgcacattataagtgggaaaaaa
gataagtcgaaatgaaatgaaacaatgcgaggaaaaaaatgtcacaacactcttcaattagaaaaaat
gacccccatctttcctccaaatagaaatgacgtaactgaagtagtggaactttctcttccatggcaac
tctagagaaggggtagatggcatgggattgtggacagatggacacagaaagaggcctcatttattgtt
attgttaaaacttttacttctagtaatagtgacacctccttcagcatttctttatcaattgtcaatat
tttttggatcaccagcatcaccttctatatgtatgtctagaaacctcctgttatgaatttacacttct
cagagtcaagacagaaatgctgtgaattgggcgataaataaaataccccccttttattgccttgcttt
gtctcttaaagaaagatgcctgttgggggactatgagaatgctttgtgcttctggacctcaagggaca
aatctataataaaaattatgcatagtgatgagaaatatatataatgcaagtttgtagagatcagttaa
cttatcttgtctaggcaattatttctaaacaatgatttcaaatcattaactataatatagcccattca
taccctccatttttgtcaaatccctgtcaccttcaaggacttggccatcccataggctgctctgcttt
taatagaggaagatgctgtaactcttggtaccattgccagttatgaatttatccattaatgaacattg
catttaaggcataggtttatctccttctccaggtatgaacctgcaggattcctacctgaagcttaagg
gagaataaatccacctgggacaatcaaggacagatcaaccaatcagctcaaagcaggtgtgaattaca
cagtttatttgagtgacaaggtagctaaagcagggataataaaagaagggagtgggttgatgtggaca
gacgaactatggctttaggaaatttggtagggactgaaacatattttgtgtaatttatgtgggtctaa
tagcttttgaaacttctttacaagacctgtgtaagtggtactggcatattcatgcatgagaaaacatc
aagggaaaacttaatagttcaaggaggtgacaaagaagagaggaaccaattattttcactagccgtca
aaagcaagaaaataatcagcttgagcccttcggggaaaagataggttaaatattaagtaacagtttgt
tattattccaagtgttttcttaaagttgctcccatactttcctgttttctctgagggaatttagtttt
tttgttggtttttttttttttttttttataactgtcattggtcagagcttgatttgatgccagtcaaa
tttttttaaagagattatgaaaactgcttaaactcttccaaagggaagatgggtcattcttaacatgt
gtttcaagaggaagagcataagagcattatatggtaaggctgaaagcagatatcagcgtttaggggcc
atgaagaggtagagctcacattggtaggatcattgactagaattccagagatcaaaattgtatgttag
tctagcattggggaggacttgtagctagtatcttcattctagcttgggagcctaggaatcaggttagg
catcttgcacaggaatgggccgatgggctaaaatctccttgagagagatgattaatccaggacaaacc
aagcagtcatgccaatgaattactttaacagggtacttcatatcctcatcctttgggcagcacggtct
tcagagatggggcaggccccaggctgcagttgagattctataaactaaggtcaaaaagatgcagcagt
gaagaagtcatgcttatcttgtataaatcatgttttcttttctttttaatgaaaatgtacatttaaca
cattttaaaactaaatattgaccctaaaattccaaccaaaaaatgctacataagtggtatttattttt
gaatttccctcatgctcctcccactgtggggacaaggagtggtggtggaagagagatcttttagcaaa
cctgtgagtagagaattagaaggtaatgggaggaaggtaaaaggaaaacatcatagatggataggctc
acaaacattaaaggccttcgtgcctgtccttcatgcctattcatccctctccagtatgtgaatcaatg
tacttgttaaatattcattcacctcacatatttagcattaaccgtgtatcagggacgttgttagaccg
ttggtttacgatgatgtgtaaaatatcatttgtaactcagactaactggaagtgctcaatataataag
atgtaatgttatggaacactaagtctgtgctgaagacttatctcctttaatcctaaaacaatcctggt
gggtagtctcaatgatcatctccaagtcacagttgaggaaattaaggcttcaagaagttaagaaactg
gaccaacatcacaaaggtagcatcagagtgacagtttgatttcaaagtgtacttgacttcaaggccca
catttccttgcacgtttaatattgcctttctcaggtaaatataccattaaatgtgatacaactctaag
catttgaattacttacaacgtgcagagttaaaaccagcattatttacactatacttcagctcgtttat
aagtgaactattattttgtggactaacctatgaaatgtaaccacattgaattcctctgttaggtacag
gtttggtgattccagggaatagagtatgactgaatgcacaggtaggggtgaagtgaacccggtcagaa
aatttagagagcatcgagcagatcattaagcagctgtctttcaaatgtgcagaacacaactcatttgt
aatctagggactatctgtattgattcttcccagggaagttacttatttttatacatatgtggtgtgtt
ctgtccataataccattctacatggtaatgctcaactttattatttaaaaaaactgctaataatgagg
tttttctttgtatcacagaagcagcaggagcaagttttctttttccttcccagtttttttaagtactg
ccaaggaatgtgattttgtcagacttgtatttcctattaagccaatctgcatgactgttccttctact
agctttacctgttcactcatttattaattcatcaaatatttgtagagtgactattgtgtgccacatac
taatataggcacaaggataaccaaaaacagacaaacgctgtcctttcaaggagctcatatagtaatgg
gaagttaggaaaggagaaaataaatatgtggtatttcaaatggaagtattaaagtgttaagaagaaaa
gagaaactaacaagatagggaaaaagtgacaggaacatgatgttttattttttatttatatatatttt
ttgagacagggtctcattctgttgcctaagctggtgtgcagtgacgtgatcatggctcactgcagcct
tgacctccctgggctcagatgatcctcccacatcagcctcccaagtagccaggtctacaggcatgtac
cacgatacccagctaacacgttttcttttcttatagagacagagtctcactgtgttgcccaggctgtt
cttgaactccggggctcaagcagtccacccacatctacctcctaaggtgctggaattacaggcatgaa
ccaccatgcccagccgaaattgatgttttatatatggcagtctgggcagacctctttgatgtgatatt
tgaacagaaatctcaagagagggagtgtattagcccgttttcataccgctagaaagaactgcccgaga
ttgggtaatttataaaggaaagaggtttaattgactcacagttcaatatggctggggaggcctcagga
aacttaaaatcatggcagaaaatgaaggggaagcgaggcaccttcttcacaaggtggcaggaaggaga
agtactgaggaaagggggaagagacccttataaaaccatcagattttgggagaattcactcactatca
tgagaacagcatgggggaagccaaccccatgattcaattacctccacatagcctctcctttgacacct
ggggattatggggattataaggattacaattcaagatgagatttgggtggggacacaaagcccaaaca
tatcattttgctcctggcccctcccaaatctcatgtccctttcacatttcaaaaccaatcatgccttg
acaacagtactccaaagtattaattcatttcagcattaacccaaaagtccaagtccaaagtctcatct
gagacaaggcaagtctgttctgcctgtgagcctgtaaaatcaaaagcaagttagttacttcctagata
aaatggaagcacaggcactgggtaaatatacccattacaaatgggagaaattagccaaaatgaagggg
ctacaggccccaagccagtccaaaatctatcagggcagtcaaatcttacagctctgaagttgtctcct
ttgactccatttctcacatccaggtaacactgatgcaagaggtgggttcccatggtcttggtaagctc
cacccctgtgggtttgcagggtagagcccctctcctggctgcttttacaggctggcattgagtgtctg
cagcttttccaggcacgtggtgcaagctgttgatcgctctaccattgtggggtctggtggacagtggc
cctcttctcatagctccgctaggcagtgccccagtggggactctgtgttggggctccaaccccacatt
tcccttccacactgtcctagccgaggttctccatgaggtcttcattcctgcagcagacttctgcctgg
acatccaggagtttccatacatcctctgaaatctaggcagaggttcccaaacttcaattcttgaattc
tgtgtatccacagactcaacaccacgtggcagttgccaaagcttgggacttgctccctctgaagcaat
ggtccgaactgtaccttggccccttttatccatggctggagtggctgggacacaaggcaccaagtcct
gatgccgcacacagtggtggggttgggggggggacctggtccacgaaaccatttttgcctcctagacc
tctgggtctgtgatgggaggagccgcaatgaaggtctctgacttgccctggagacattttccccattg
tcttgcctattaacattgggctccttgttaaatatgcaaatttctacagccagcctctccagaaaatg
ggtttttcttttctactgcattgtcaggttgcaaatttttcaaacttttatgctctgtgacctcttga
atgctttgctgcttagaaatttcttctgtcagataccttaaatcatctctcaagttcaaagttccaca
gatctctaggtcagggtcaaaatgatgccagtctctttgttagtcatagcaagaatgacctttactcc
agttaccaataagttcttcatctccatctgagaccacctctgcctggacttcagtgttcgtatcacta
tcagcattttggtcaaaaccattcaacaagtctctaggaagttccaaacttttccacattttcctgtc
ttcttctgagcctcctaactgttccaacccctgcctattacccagttctaaagttgcttccacatttt
caagtatctttatagcagtacctcactacctcagtaccactggtcttaactcctgcgctcaagcgatc
tgcttgcctccacccctaaagtgctgaaattacagacatggtccattgtgccgagccaaaattgatat
tttatgtatgacactctgggcagacctctatgaggtgacatttgaacagaaatctcaaggaaggggag
aaattatccatttacatatttggggaaagagcattccaggtagaagaaacagaaaatccgtagtcttg
aggaatgccgtgtatatgcagtatttttcaaacttgttattttgaaatacatatacacttacaggaag
ttgcaaaagtattaagaaagatcatgagtacccttcactcatcttcagctaatggttacatcttacat
aattatatgtaatatcaaagccaggaaaccaggaaattgatgttgatacaatctatgctttattcaga
tctcacatcttacatagctatgcacaatataaaaaccaggaaattgatattaacacaatctatgcctt
attcagatctcaccagcttttacatgcacttatctgtgtctgtcattctatgcaattttataccatgt
ttagagtcatataacaactacccctattttgatacatggtactgaatagttccagcgtcacaaaggaa
ctatctcaagccaccctttaattgtcacacccatccaatctcccattctacttcctgaatcactagca
acccctaatctgttctccatctctatgattttgtcttttcaagggagttttctaagtaaactcatttg
gggaaagaaaggagatgaattgttctagccacggagtggagaacagagagtaagagtacctattgaag
cagagggagtcattgcaataattcaaatgagaaataatggtgattctaaaccaggaagctttcagtga
aaacaatgagaggtacatggattctgggtatttttggaaggtagcactaccaggtttgctgatgaatg
gggtatggggtgggaaagaaagagaagagcccaggatgagtccaaggtggataaggtgaatagaattg
agaaaatggtagaaggatcaagttagatggtagaggggtaaaggtggaagcaataattttgttttgga
attgttaggtttgaaatcttgttagacatcccagtaaagtcacaaagagtgcagttggatgaaagtat
gggattcagggaagaagtatgtgctagagatgcagatttgagagtcatctgtgtggaggtattattca
aattcaagtccccttggaatgaatggctattcaggcagggtcttcataaaaatgcttgttgcatgcct
gtaatcccagcactttgggagtctgaggtgggtcgaacacttgaggtcaggagtttgagaccagcctg
atcaacttggtgaacccccatctctactaaaaatacaaaaaaaaaaaaagttagctgggcgttgtggc
acatgcctgtaatcccaggtacttgggaggctgaggcaggagaattgagccaagattgtgccattgca
ttccagcctgggcaacaagagcaaaactccgcctcaaaaaaaaaaaaaaaaaaaaaaaaaagcttgtt
gcttcaaattcatgtcagtctgtaaaattatctgggaaggcagtacaaaaactgtcactttgactacg
atgtttctggtgacccatcttcattgatcagtatggaaaaggcatgtctctgaaaatctctgagagtc
tttgatacagcaagaacataaggataaatcattcttctatgttcatggttgtagaggatcttgaatgt
ttaatggcagaatagccagatcacactctggcacttctgtatgagaggctgagggatgttactgattc
accccgagaaatatttactactaaggggacagaggcaaaggggatacaagacttcaccctgagctgta
gcgctccctccttccctatcctgctttcattcttcacattgttttccttctttcttttttattattat
actttaagttctgggatacacgtgcagaatgtacaggtttgttacataggtatacatttgccacggtg
gtttgctgcacccatcaacccgtcatctaggttttaagccccacatgcattaggtatttgtcctaatg
ctctccctcaccttttccctgtgtccacattgttttctttctttttgaagcctctcattcactaggtt
tcaatcctgccttgctagtgttctaactctaaggcctaggcaagttatttcaccgaacttagcctcag
tgtcctcatctgcaaaatggatagttttatgatatcttcagcccttaaagtcaatggttctgacagct
agggtgtactatcttcttggatatcagtcatctcaagcaagccctccttttttggaccttcttttcac
acacttcacataccttagagaacataatacacatcctctttactcagggcttattctttataacaggc
ttcctaattcaattaactcaacttttcaaaaatattagtgactactgtgatgtaaataaatttgcatt
ttataggggtcttagtaacccagaagggagtggggaaaattaatatatattgagagtttattaagtgc
taggtactgtaaatattttcttgtatttaatcctccgagtaattctacaacaaagatattatcattgc
tattatgtaaataaaagaacaaagtagaaagaaacccacggtcttgtataagctcccctagttggtgg
gtattgaagggagtatttcaatctttggtagcttctgagtttttgttctctcagggaatctgccagat
gtccagggcacctgccaaaccctatgaggctataagaaaaccattaagggtcttagattacccagctt
tttgggagttagaattctgaatgaaatttagtgttcctgcagctacaaaggaattgagttagggaagt
gatgactttatctttagctacattggttattttccttataataatcctggcttggtagattagaggca
gcccgagtaacccagaatcgctaaaatagaagtgcgagctcattgcccgctgtccttcactatgtttg
catataggaagcaagaataaaacaagcataaaataggctaactagcttgtcagagctcttcacaccaa
gtctttgtgagttccaataagacactgactattattaaaaagacagagactccacataagtaggaatt
tattgttttccttttcagtcaccaaaggacaatcctctgcataggttagcaaaaaatggtactgatcc
tataatctctaatattaaagtttagatttggcaagctgtacatcttatgttgttcattaacaaaaaac
aatattgattggtatcttgtactataacttgtactgtgggtcaaattccaatacagcaaataccattg
caataacaattctacaaaactacatcaaaaaaacctttcatgtttgagccaacagcctgatagtgcta
aggactttgagtacagtatgctagaagattcttaacagttatttgtcctggacaacaaaggttgactc
cattaaaaacatagccatcagtgtgggattatttccaaatcaagcttttggaaaagtcaaatgaaagt
ttgcaagcaggtggggcatggtggttcatgcctgtaatctcagcactttgggatgctgaggcaggcgg
atcacctgaggtcaggagttcgagaccagcctggccaacgtggtaaaacccccatctctactaaaaat
acaaaaattagctggcttttgtggtgcatgcttgtaatcccagctactcaggagcctgaggcacgaga
atcacttgaactcgggaggcagaggttgcagtgagccgggatcatgccactgcactccagcccacatg
acagagtgagaccctgtcttcaaaaaagcaaaaaacaaacacgcaaacaaaaaaaaaaaaaaccaaag
ttggaatgcaataaatgttcattgaatgaatactgaatagggagtttcagctaatccactcaaaatag
tgctgaatttccagctctaaggtcaatgcttggcatatatatcctgaaggaatgaatggacacagagt
aattttttttctaaaatgcaaattcaattatgtcacttcccttcttaaaatccttcagtagcttcccg
tagcctccagcatattattttgaatagtgcttctcaaactttgatgtgcatcagaatcacctggggat
tttcttaattaactgatgctgattcagtaggtctggggtattgtctgagattctgcatttctagcaag
tgctcagggttatagcaatgattttggcctgcagaccatactttgggtagcaaagacataagccactt
aacttgacataaaagactgtttagacccttagtttctctctcgctctttccccattttgagcttttgc
tccggttcatgtttttccctgaaaataccgtgatcttacattgtctgtctggatgctgaattttccct
aattctgggcctccatgtagttttaggtttgacatcacaaccaccaaaagatttccccttctccctta
atcttggttaatgtcactctcatgtattatactgttaatgaagcattgaggacataaaacttatcaaa
tattttatcacaatcaatgatggcaccagtgataacatccaaatgcctgggtgagtaaataagaggag
aataggggacttgttgttaaactaagtttgcagagaaaaaatgtactgattataattaaattggatgt
ttatttgttatgacaaaaaaggagctagagtcttttaatccaccccttggcaccactgcttatctcct
tgtaacatacgtttgattcccatgtctatttcttccatatgggaaatttcagctccctaaacatcacc
aatacaacctgttgataagacaaagttaaatttattgcttactatggtaagaaagaccacagcctgga
caaagctttggtagtatttcataaggagaaaggtgaggttggatttcattgggagtatgaagcttggt
ttaagattggtctttcactgtgggggcacaattaggattgggtaaggatcatggtattacaacttagt
ttggtggaaacagcacagtgaagatttctagccaagaggctcagagactattaaggtgtgaactctat
tgatgttttttgttgaagagttgatgggagtttggggaagttactttagtgaacagtcaaattatttg
cctggccaagagttatctgtaataggaaagttatgctaatgaagacaatggaaaggtaaaccatgtta
atgtcgacagccagctatgtgagcataaggggtaggtagctttggtcctccatgtccaaactgtttgt
agtggtaagtgatcttcattctcacatagattgaaagcttcctgaggacagggcaatgtctttgtaaa
ctttaaaatatctatgtcctgcacatcacctgccgtagacaagcatctagtaattgacggttgggtag
atactgagggaaaacatgcaccaaataaaaatggcaataggacacaaattcactatcatttggaagaa
taacagtgttttccactgatatttgctacacacagtggggtccacagagcagcagtaccacttgggag
cttattggaaatggagactctcaggcaccaccgcaggtccaatgaattaaactctgctttttttaagg
tcatttgtattcaattattatttttttcttttttctttactttcgatgcatttttctttatttgtttt
tgagatggggtcttgctattttgccgagtctggtcacaaactcctgagctcaaatgatcctcccacct
cagcctcctaagtagctgggatcacagatgtgagccaccacacctggcttgtatcacattaaattttg
aggagcagtgctttaatatctattccattctcatcacttgatgaggtattattaattccacttatgga
tgtggaagttgaagccagaaagtttaaatgacttgtacaaggtcaaacagcttacaggtagttgagcc
aagaggctctcaagtcttctgcctccacaaacccctgttcagctgctgccctacaatggaataaaata
tactaatcccagagggacaaatatgctaaaaatctcaatattatacactttggaaggtgcaggtgcat
tatctttcaattctaatttctctttcaagttttetgatgcataaaaatatgaacagcaggtctgagca
atgtttagatgccgtgctttgatccttttgccattcaagatgtttgatttgcattctgccaaggaatg
tctggtaacctccatgatgcagaccacaccattagtcaagagagagctgacgtaccttcatctgagag
ctggctggctgtgagctgctcagagggaaaggatttctatttacaaattgtatcgattatttataaat
aaaagttccccttgctttcttcagttgtaaaatctgcagttagagagtcgggaagaagatcaaaactg
catacatttgcatctgccaagcctgataactagttccagaattacagaaatggtgctgaaatagcacc
tcaagtaccaggctctatcaaatttaatctatccataaggcaactgccaattatattttagagaaaaa
atgtagactgaaaagatagacaatccaagtagcaactcctgtaaaattatatgcccataggagcaatc
ttgaagatataaatattggtatgtttctccttcatttatcatttatctgatcatttgacaagtattta
ttgaatgcctgttaagggtgtagatatatgtggtgaggctgcaggtgtaagtaggtctttctgaggat
atgcatgaagttgatgttcataacttggagatgtgtgtatacagactgaggattccttcagtggatat
taagaagtggagtaataggcagtaaagaatacactagtcagttgtggtacataaacacgtcagcacca
cttaggtattaacttcctgttttgttttgtgtgtgcttaattacgctgtttattaaacaagcacatca
taatctgcagatattgtcataaacagcacaataaagcctgccacatcagaatgtcatctatcaaatta
ggtgtgttcctcagctgtcccgataggcacacacctgtgcctgtaaataggcgcttggcggagattgc
ttccaggtgtggatctgttgggcgaccttgggatgtagggcactttggaaccttttcctctagcttca
ggaattaacctctgggcttggttccatgccagcttgcattttgctttgggacagtaacatgtaaagaa
tatgcctgtgaatttagggttactgagaagtcctcatagaagaagtaaaatttccttgaggaatggga
gtcttttattcaatccaggtttaatgcaaggcttggtgaacagctccagaaggttaataattgcgtgc
gtgtgtgtgtgtgtgtgtgtgtgtatgtgtgtgtgtatccttttgtcattcaaaagtatacgtataca
cacacacctgtacagctgatgataaatatacattgtatcaatgagttcaaatgaagtgtgctattcat
tcactgaggaatgggctattataatgaactattatgatattagaaattgtcagggcaataagcaaata
atacatacggttttcaacaaactttctaagtattgttatcagtgggtttgcttaaatctttttttaca
aatttatttatttttttgagacgaagtctcgctctgtcgccaggctggagtgcagtggtgcaatctcg
gctcactgcaaccactgcctcccgggttcaaaagattctcctacctcagcctcccgagtagctgagat
tacaggtgtgcgtcaccatgcccatctaatttttgtatttttagtagagacgggttttcaccatgttg
gccaggacagtctcgatctcttgaccttgtgatccatctgcctcagcctcccaaagtgctgggtttac
aggcgtgagccaccgtgcccaggcaatagccccattgctcagtgaatgaatagcacactttattttaa
ctcattgatataatgtatatttatcatcagctatacaggtgtgtgtgtgtgtgtgtgtgtgtgtgtgt
gtgtgtgtgtgtgttgaatgacaaaaggatacacacacacactcttattaaccctctggagctgttca
gcaaaccttgcattttttactttcattacagtgtgtaaataatttagcaaattctaatttgaacctga
tatcaattgagcatttaatatttagccaaatatttatcaagtgctgactgtgttctagatgctggggc
tgcaatttcgaaacagaccattgaggccctcatggagctcacaataaatgatcttccttaaagtatca
ggtctctggtttgttaccgtattttttaaattgttaaggaaagaaaaaggccctatctttttgtagac
aaacatgccctaagtgcttccagaaataatctccatcaggtaatgcagactgtgtgtggagtgaaatt
gagtccaatccatgatccagcagagtttcagcccaggatttctttagagcctttgctacacacaaagt
tggctgatgtgccattcagcatcccagcagctctttctcttcacactagcaatggcaaagctttgtgc
ggaggcattgctggctgctctgaactaaaagcatccgtggggaccgaaagaggtttttgcacacctta
ttaaggtaggcaagtgtgtctgagtgtgtgtgtgcctaaaagctggaagacatctgttgagaggaaag
tgctcttctgtgggtctggcagcttttctgtaagtcttctattctgatgcaggagcgtgtgagcagtg
ggtgggaggagatgctttggtacttggaatgctgaggtccggattaagtggtattgtaatagctagtt
agaggcagaataaaaagctgggaatcaaagcatttaaaaatgcatccttccattatttgctctcaagt
taaaccatattcattctaggggaaattaaaaaaaaaaaaaaaacacagcaagggcaagtagcccaaat
ctgtaaggtctttgagcttctctgttcgtccagcttttgaagtcttcctacagccaatttgtttggct
cctctggagggggcaattcatatccacttccctctcctggagcatttctttcttctatactccatcag
ggaacaatagagtttaacagtaacaggcaattttttttttttttcaaagcttgtgccctcttctgcgt
ttaaaggtgttttttaagagactcctgctaggggaatcttggcgcctgtgtgttaagacggcaattaa
cttttagtatcagtgcttacattaaattttctctctttctgctttactaaagcagtcattaaaattca
gtgtgagtaccatgaaactttatcataaaaccctgctttgcttagagaaccttgattgttttctgaaa
gcagccttctcagtttatatatacatagctgccttccttggaatatcaaattgctttgtgtcacatta
agaaacactaggttgaacctctatactgtgttttatctgagaaaaatactactgcaaaaagtttgatt
tgttcaagttttaggatgaaaatttctttgtaacaagttatttgagttgcatactatgtcatcgtata
tctctttagttcaagtaattttgcaattaacatacggttatgtaaagaagataatgatttatttttta
tttatatttttaaaagttattaagtgaggttttcctttcagtaagagtttagaaaaaatagccagaac
aagtaactggacttggaagataaagatacctttgcacttctaaattttacctttgtacacttcggttg
tgatttaatcattgaaatgcctctgctttgaagtaaatgcatcacttatggtgtatgctgtgttttaa
taaagggaaaacagttatgggttctctgttgcacatttgaatgttgttattttttgctgtatttaata
acctcttttttctcttgtgaggtttactttggaaatgaggcatgttcaaaaataggctgacattcagc
ttctatgttttaaatttaaatgctgtctgtgttttatcacatctggaatgtgtggggagaaaagatac
caagttttattatttagatttaattgtagaattgcagattgatatttttcaatgcattttcattatag
tttctgccatggaggcagcgtgagggctttcaggaagatggagtggtgtaattaccaggtgcgcacgt
tcattaatccttcctggctagagaaagcttcaagttcttctccagtggcccattcgtaaagctataaa
tatctaaattgtgtcagccaagaagtcacacagaatggtggctctttttgagttcaatttcatgcact
gttgctttggtcttgtgaggaaagctctgaattccttaggatagtcttggttgtgaagttccaaaaac
aaaatatcaaatcattaaggatttaatttaaaatacatactcttctttcacaaactagatgattgcag
taatgtggattataaatttttttttttgctttatttctttagagctcctctttttattttgtatgatc
aagattatagctgagattttggtgatttttttaaaaagatttatggcttatggtccatcagtctctcc
actacttcaaacctgtgtacccctgtatattatctgcagtactggaatgtttgcattgtatgtggaag
ctatatacgatttggtaaaaaataacacttaaaggtcttcgctaagagtgcttatttaatcattaaat
atcccttaataaaaataattccagagatattgtctgtgtacaaacttaaaaaaagagaaatataaaat
actgtgatgtgaataaaatgtatagcaatacactccaataataccattcttatgttttcccttgttct
caactgaaataactaagctaatagagacgtcagtaaggaatgtgttgtttcttcataatacaactaca
aactcatctgataagaacaacctgagagtgaacgttaactttcctcattagaaagattcaatttaaca
catatatacaaatacatttttaagataatgatatttgcagagtttttgtattctatggagtaaaggag
aattatcacatattcaaagtaaaggtataaaatacatcttaatgttttacttaaattttaaagggtcc
aaaatatactaaaattctttttctaattctttcctatgtttaaacgtgccagagtcattggaaatagg
acattctttttcttaagaagattttgcccaaaatatttaaaactattttcttttcccttgattttaca
atttcaatattcatggatttttctactttaaaaataacagtagtttttatgatcttaaaacaaatgtt
taagggcactttcgctctctggagactataccatccacatatttattatcagcaaaagaaagggcagg
gcatacttttatttgaagttgagtataaaaatgtgtctgtgtgtgagtgttattaaaaagataagtga
agagacaaatatagaatccaggaacattttcagcctggcttttactctctctaaaaatctaatgaaac
ccttgagcatctcttatctcaaggtacattaggaactgtccaacactatgatccgatgggagatcagt
atattcatataaagaagaaaatttgttgttagtgaaagtcaagtcttttaaaaaaataatagttacag
catttgcaatatacaagcataatagatttactcaacgcccaccccccatctttaaaaaatcaatttcc
gacagttgtctactttaaaattgaacatatttgctacctggagggaacattgtaatgtagcccatatg
tggtatgcatcctgaagaaaacctgaaattatagaggaagttatcctgccttctttcttctgttgaat
gagttaaaatatattaacaatttgcctttcactttgtatttatcattttgtatctttgcatatttaca
tatacattcatgtgtacaagggcatatatactcacaggtcagggctatttaaacagctatttatttga
atatgccagggaaaatctccaagatataaagaagcagttattagatactatgtcagtatagaattaac
agccatcttttttaagatggaagagaaaattaattaattacatacaatttctaacctcaagacatttt
ctttctggagacaaggaatactgaggtgctcacgatagtgaagactcaacaagaccctaataaaatag
atgaggataagtaaaactacaatagccaataaaaaacaaaaaacaataaaccatgtttcgctggcatg
ttggtgagtatctctgtaatatctgtcaataagggtctctgtagatttggagtaatgttcaggaacta
cctgtactagagaagacagtggagaggactccagtggctaaattctgctgcctttgcttccagaaatg
taaataataaggaggtattgtggcatttcctggaagcagtagtcttgtttcatggtctgactgtataa
gaatgcctagagaaacataacctcagctgactaaactcccttgatgattgtcactttgtcactgaact
ctgaccataccttttgcctccagaggcaaaagacgggtgaggaagtgatctcctcatctggtttttaa
acaagtatataactagagaactggattatctcctaaacccactcttgtccctggaaaaaggggagtca
tcctatccgtttcttagccaatttatgtatactcttagtttgagagcatgagaaggaaaactattttc
ttttcttaccttggctgggtttttaagaatttatttttagtttaatcaaaataatattttaaaaggta
gtaagcctctcataagcagtttgatctgttctaaaataacttcaatttttctttttttaaactttctt
ttatcttacacacaaagtataatagtaatatgtactcactagaacaaatgaaacaggatggagtcaca
tagagaaatatatcatattctccctatcccctcccttaatattaacatttaggtgtcatgtgcttctc
cattaattttcattgcaaaggcctaaattttcttccaagagtgaggagtagcagcacggtagtttgga
cctgatatagctctctttccctagccttttgcttaagtgctttcctaggggctgactttacttaccta
aagatgtttcaagcaagggctcacatttttggtagcagaagacacttactgattgctctcactaataa
ttttgaaaggaatgtcaaaatctgggaggatcatgaaagaaatatcagaaatttcctttcagctgcca
ttctccttaatactgttatcaataaattcagcatctcatatgtgatagcaaaaaaggtgctgcctttt
gttcttgcatcctgaggttcttacctaataccatggtagcaataaagatggtgagaaaattgcttctt
ctatggtgttcaggtcctgaacgagcaccctcacctccacagacggtggcaggtattcaagcatttta
cagactttggagttaaatatagcagtgttattctaatttaggtatgccaccaccagcggcaccggcaa
ctgcaataggaaaaatgattggcaatgccagctatctgatgttttcatgtgccaggtgctgtcagttc
ttcacagtattacattccatcctcacaacaagagagtgccagtgagtgttgctgtgtgccagtgccca
ggctaagggctttgaacacattaccctgttttatcctcataactttccacgttatttttattcctgaa
tgaagaaacaagttctctgtagagatgctgtcattgatccactcatatcctttcacatccgtttaaca
ttttccctgctgtgcttttactcccaacaactagctccctaatcgctctgttggagggtggccttgag
gctgccagagcctatttggtctgtgtaaagagagagatggatctatcctggaatttatgtccctgtgt
gtgggaagcccttaatcaatgactgctggttgcagacacataaatacgtgagctttcttgttcccaac
tgagaaattcagaagtgtgaatggcactgccaccctgggcttttatgccatatatgtgtttggtctgt
ttcccttcccaatctcacttcattttcccttaccagtgtttcttgaaaacacatcccattagatcatt
tttgcatgaagcttcatctcagaacctccatttagggaacccaaactaagatattctctaaaatagaa
actttattgataaagtttccaaactgtcttagtagatggccaatataagaccaagccaaatctttctg
ggtccaaattccctgtctttaattaatagactccattacaacacattcttcaatctttagtcagcaaa
cacttaccacgtgcctattttatggcatattatatttataccatagttaggatattatggttcatgaa
tattttatatctgtacacctgaaattctattgacctctctgggccacagttttgcatctgtaaaatca
gcacaataatgctacttatctcatagagtagacttaaaaacgaatgaaatgatatatgccaagtgttg
agaatcacaattggcaattactcatgctcattaaatattagctgtttttatgagtattgtttcatttt
cggtgcataatatcctatgcaaagaacaaaaggtattggtataggcattgaaacttgaagcatagaag
aaaaagttaattaaccggtgccccactagatgcctctaactgctggctccgtgtatccctttagcctt
ggctcgtcacgagaaaaccttggagacatttctgctggactcagcagatcaatttaagaaagatgaat
gacatttttcttgaaatgtattcagtcatagctgcctttttctactttcatattttggagttcttaga
aaaaattaaggactcctttttttaaagaaaatggtataaaagaaaatgcatatcactttgtcacttta
ttattgtaacctcatcaaagtattcagtgtaaagacagtagccaagtgaactcttcttgtaatgctcg
gaaaccattttagcaatggtaaaattgctgcaatttatattcgtcaaattgcatgatttgacttattt
tagaaaagttattaacttctgaagagaatgcttcagaagcatttaaatgagtacaagttatcaccagt
gatatacataaatttcatttcaaaatatacttctagaaactgtacttagttagctatagtatttgtac
aaggattaattcctatttcattttgtaggaatttatttatgaatgtctatggcctgccagtgtaaagc
agacttagagcatcatcttttacaataatctttttttttttaatcaaaggggagatattctggtaaaa
caaaacaaaacaaaaacaatagtttattctgcatttttattaagtccctctgtaagtcatccctgaaa
tgggatatgtagagtcttatatttatttatttctcagaagcttattggaggtgatatgaaggatttta
agaccctactaactaacaaaacaacaatttaaaattaattttcaaaataccttaacaaatcttattct
ccttattttcaaattctttaacaatgtttttcttattactaacataatatcttctgatgtagtcataa
taatatctaaaatgacaggtctaagtaacttacatggattaattgagtcttctaaatagtaaggtaga
tggcactattacttctatatgagaaatgaggaagtagaggtataaataagaaattttttggccgggtg
cggtggctcacgcctgtaatcccagcactttgggaggccgaggcgggctgatcacgaggtcaggagat
cgagaccatcctggcgaacacggtgaaaccccgtctctactaaaaatataaaaaattagcctggcgtg
gtagtgggtgcctgtagtcccagctactcgggaggctgaggcaggagaatggcgtgaacccgggaggt
ggaggttgcagtgagccgagatcgcgccactgcactccagcctgggtgacagagcgagactccatctc
aaaaaaaaaaaaaaaaaagaagaaatttttttgagtgtatacagttagaaaatggcaaaatgggaatt
cagacccaaacagtaagactcaaggatacctttcttatcagtatgctaatatgaaaacctaagcatac
tagaaaatctaagtgccagttggaaaccagaattaacattttggtgtgtaactttctggctgcttttt
ctatgctaacaaacatatatgacatacaaaaatacacacatacacaaattcctgttcactacttcttt
tatgttaacatcacaatgtaccgtacacagctgtattattttatatttgatttcatattttttctaaa
gtcagtgtatttgtcaaatatcaacttatctatttaataggaatatgggatgatctttgcttatacat
acatacatatctatataaaaacaaaatcaagtattttaagcgttcaccagaagtcatatgtcaatcag
taaagtatataattttttgctgccaatgacatatatcataaaaacgctacctatcatagaatgaaaat
gaaacacagcaatattgggacacctattctcaagcaacagctttgtgatttattagctatctcacatg
aaataactcattaacttggtattccaagcagcaaaagaaggatcacttaggtcacttgcaaaataata
caaagctaggtttaggggtgggttgcgcttggtgggatgtagatgaaaccatatgggcccttgagttt
ataattgctgggatctgcatggtgggtatatggatgtttattacagtatgctagtgagttaagaaaga
agaggaattattattgacttacatcatagagtttatgcaaaaattaaacgataatttatttttaaact
ctagaggtataggtaccatcatgaagggacccacagaactgatgtagccagtaattattggagctgga
acagatactctgctgtcagttgttctggttttgtggtcattgttcttgcctttgcaagttaccaactc
taagaccttgggcaatactttaagtcttggttgtctcatctgtaaaatggggagagcagtaagtgtct
taaaggtttattctcatgttatatgacttacggtatgtaaaacatctgcgtttagacacatagagggt
gcttaatggatgattgctctcattattaggctacatctaatctatgaatttaaaaactgtatagaaat
atgtgacagattctttaagagccaaataccaactacagtgaaaaatacttaacacttgctgagctctt
agtatgtgtcaggcttaactaccttaatgctcatagcaatcctataagataggtactcttgttatcct
attttatatcttctaaaattgaagcaagggaagttaaataataggacaaagatcatacgctatctatc
catatatacccatctggctgtctacctgtctccttccatccatccatccacttattcatctacccatc
catccactcagttacttctctctctcccaccatccctttccctttccctctccctctccctgtctctg
tcactctcctttacttatctatctatcgatggatcggtttatctatcatctatctatctctatcatct
atgtatagttgttaataacactaacattttataaattacaagactgaaaaatgttttcattaacttat
ggtaacaaaagaccacattgtgaataaaaaaagcagtaaacacaggtctctgcacatatgaaagagat
gtcctaaacaggaagagatgtcctaaacagtagggatacatagtatcatacaatcaaaacatggcagc
cctataaaacttacaaagcaatttcatgtaagttatttcatttgactcttaccacaatctatgaggtt
actatttttatttttctcattttacaggttaaatttaatatggcttccaataaaaaattagtatggtt
aataaa£atcttgacgtcttgctcctataatcctaccgatagtttacagtaattagtaaaataaaata
ataggaaaaatacctttgatactagtattaaattataatcatatcattaggtaatttcaatttgtgat
tttcaagaatctgtaatatggtagcttcttcctactgacatgtttgaattcattttaaggcttataat
tcacaagtaatctatatattatctaaaatgtaaatgcacattcacatggagataataaattagcgtga
aatggctgtattttgctctctataatttttaacatacaggaaatcactgttgtctcaaaaatcaagga
aatatagtatttgaggtgaacttattctttctactattaacacattttaatatagttctctcacagtg
caacagagcaagaagctttcagacacatttgctgctgcaaggagcatgctgtgctgaacttaaaacac
cttccctttcaaactccttgggactgtttttttccaagagacttcaaatgcactaaatttagcatccg
ttggaggcacacccaggcatattatagtgaaagccccaataactgaatgtgttaccactattcacaat
gtttatgtgtgtatatgccttatctatgatgtattgcaaattacaaaaattgtgttattattcacagt
aacaaaaacacttccagcaaatttctaacagtgatctcttttgaaataacttacatacatgtgtcatg
ggtcttaaactttgtcacttttatgtttccatcatgttgttttagccagtgagggttttgtttggttt
tcatttatgattatatactttcaaaaaatagatttcaaagtgtgaatttgattgattgattgactgat
tcattgagacggtgtttcactcttgttgcccaggctggggtgcaatggtgcgatctcggctcaccaca
acctctaccacccaggttcaagcgattctcctgcctcagcctccctagtagctgggattacagatgtg
caccaccacgcctggctaattttttgtatttttagtagagacaggggttcaccatgttggccaggctg
gtctcgaactcctgacctcaggtgatccaccctcctcagcttcccaaagcactggaattccagacgtg
agccaccgcgcccagcccgtgaattttatttttgaaagacaagaatgtccttgcctaattgcataata
gtttaacatcatgaagactaaatatgctttttagccatgacaattttatttattattgttttcatttt
taattttctcaaagatcctcatcagtgtactctttttggtcttccttataagcgtattttaacaggac
ataataataagataaatcccaactttttaaagttgtatccgtatgtattactttaaagtgctattaat
ataaacgaattagaggcaacttttattcaatcagattttaagtaattttaccaaaaatatggccttga
taatgtctctgtaacaggttctctgtaatatacatgctgaggattggtttgtctttgcttttgatact
attttaattagaaaagtaatggggaatccagacccttctcatttaataatccagagaaaaatcagtcc
atgttctaatagtttaaatttttctactaaaacccatgtgagaatccatatgagtggaatggagagga
gttcagcttcaaagttggcagatttgagatgattctatggcaacagaaatgtgcttgagggaaatcag
ttgcggcatcttctataattgtgtcacctagattttgccttaggaatttctagatttccatagaacat
tgtgacctcaaatgctttatcttaataaagaaataaaagcagattagaagaattatttgcctacagtt
tgtgggagatgggcaagtcttaagagtttattaggtacccagaacgaaacatattttcttgggcctca
taatcacattgaaatacaaggatttagttatacacagtgaccagttagtgaatgacagtcttcagtat
ctagtagacagtaaacatataaagatgtatttgtggccgggcacggtggctcacgcctgtaatcccag
cactttgggaggccgaggcgggcggatcacgaggtcaggagaccgagaccatcctggctaacacggtg
aaacctcgtctctactaaaaaatacaaaaaaaaaaaaattagccatgcgtggtggcgggcgcctgtgg
tcccagctactcgggaggttaaggcaggagaatggcgtgaacccgggaggcggagcttgcagtgagca
gaggtcaggccactgcactccagcctgggcgacagagggagactccatctcaaaaagaaaaaaaaaaa
aaatgtatttttacttttaactacagcgagagaccctggcagcctacagcatacaattagtgttcatt
atttagattgcatggatttaatgtgaggggtcaattacttgtctaaccagtgagcctagcctcttgct
caatactgcctgcttcatgagggtgaactgtgctggagaaatatattacaggattatctgcagatttt
ttttaaatgagtggttaagtcaaaagttcttgtgaaaattcagagtaataaattattatgaagttgtg
taactaggtaaaggatagtttcttttacacgggtaaagattaacatgaggaggaaaactttagcaatg
gcatttaattccattcaatatatttatattgagctcctttaaaaatacagggccttgtggtgggtgct
gaggacagaacaaaaaccaagtaatacatgaacataacccttgatttcatgatctagtagacctataa
aagttgtcgatatctgatgaaaagaaaatggtaaagatattccaaacagtgtatgcaaatccagagat
aggatggaggggctctacctgaaggatgatgataagaaaaccgtgttgagtgaagggtgatttgtgga
attcagataaaatatcagtcttgaatgctgagtgaatactcaatgattgactagatcccatggacagt
aatttcttcaattatgacgatgctagtgtttatgactataactatcattctccatgccaggcactttg
ccatttggtaaatgtatagtgtgctattctaacaagcatgcacagagcttttactttaatgtatccat
gagtttattggggttcagaatttaggtaagctttgcaaggtcgtagcatggagtaaaatatctgaaat
tcagacccatatctaactaagttcaaagactgtacagatatttctcctcctttgtgcagagaaggata
ggaatgcttccatattatcatggacttagtcagatgttttaaaattataatgtcctgtgttaatgaag
aagggatgatattcagtgcatattcttaaccgttactttgcttaatgctctcgacttttctgtgagat
ggatagtgtagataaaatccccaaggggactcagcaagtgcaagtaaaacaatgaaactttaaagccc
tttgtcaaaacctctctttttctcagaggatggaagggccgtaaaggttggtgaggaaggatggacca
tttcctatgtagtcttctgacaatattcaaacaaaaggagagtcagcaaatcccccttgatgtgggaa
gttttaatacaatttgcagagtgtctctctggagtagacatcctcctctgcaatcgtgtcttctatat
agcctcagggctttgggtaggtaatcctctccaaggagagtcctggagagggctgtctaccccccttg
caccatcctctaacattattctatagctcagctccttgtttctgtttcctgccttgtttttgtctgag
tctgcaattatgatgtaagcaccatgaaggaaggtatgttgccagtgtttgcatcagcatatcccccg
tgtgtagcagcgcaagggatatagtgagccctcaatgtctatttgtagaaaaaagaatgaacgtatca
acgaaatctgatacatattcattgtgtctgttatctccatctctcttgtcctgccttgttatcttgcc
attttcacaaaaggccccaaggcccatcatttcttgtgtaacttccagagtgttaatttttaaattaa
aattaaggctttctacatgagtgtctattatttgagaaaccatgcaagatcgtgtgtgtgtgtgtgtg
tgtgtgtgtgtgtgtgtgtgtgtgtgtgttgcactctatattatattgaattctggattttttcttat
aaataaaattttaaaaatagttctttaaaaataggaataagatgttttaggaggcacagagagcaaag
gagaataaaaattgcaggtttggggttgtgcatactaattgccattgagtaaagagagcacactgagg
ccatttagaagagaattaacgtgttttgtttttgtttttgtttttgtttttgtttttgtttttgtttt
gagacggagtctcgctctgtcacccaggctgaagtgcagtggtatgatctcggctcactgcaacctcc
acctcccgggttcaagtgattcttgtgcctcggcctcccaagcagctgggattagaggcgcccacaac
cacgccaggctatttgttttttttttttgtatttttagtagagacggggtttcaccatgttggccagg
ctggtctcgaactcctagcctcaagtcatccacccgactcagcctcccaaagtgttgggattataggt
gtgatccactgcacctgaccttatttttattcatttaaaaatattaaatgttactgcatagggagtaa
tgggcttaacaatgaggtgaccaaaactcctatgtaccatgcagagcaatgtatcaaatgtttttaac
tataaacttctcaaaaacataaacctaattgttctgcagctgcaggttatatctgccttgtttgagca
aaatttggtggtgaaaatgccttgcttccatttttccttcaataactgatatggtttggctgtgtccc
cacccaaatctcatcttgaattctactcccataattcctacttgttgtgggagggatccagtgggagg
tcatttgaatcatgggggcggtttcccccatactgttctcatggtactgaataagtctcacgagatct
gttggttttatcaggggtttctgctcttgcgtctccacattttctcttctgcttccatgtaagaagtg
cctttcacctcccaccatgattctgaggcctccccagtcatgtggaactataagttcaattaaactac
tttttcttcccagtctcaagtatgtctttatcacagcatgaaaacggactaatacaataacctatata
attttgaaaagtacttgtctaatagactttcacaatagaaactatatccttatcaactttgaaaagtc
attgcttaatgcctttggataactgaattttctaagattattttaatttcgaaagttaaattttatcc
cagtgttgacgatttttgtatgctacttttaaaatattttgtcagtgatttatatctatggtgcaatc
ttgtaaaaaattaacaatgcaaatgtggctagaccatttaaaaatcaatatgttataattcagcccat
ttaatcactttagttaaacatcttaggaacaactcagttccatttgagagaagacacagttttctaga
tgtgtgttgtggcatcatattgctttacaatatcttacataaggtgaattcaaatcatatcattgaat
ctgttttaaattctgtcatagcttaagattagtgactaaatattggcaggtttatggaagtaggatgt
aaacaagacaaaaacaagggtggaacaagtaattttagtatattattcacttgcacagagaaaagtca
ttcacaccttcttcagctttgtgaagaaaatagactaaaatcctgttgatatagcaactatgttttcc
gtttcttgtataaaaataaagaaaacttcctattaggaattagccagacattttaattttctctcttc
tttctctattttcccttacagtctctttgaaggcaggcaaaatttctataaagttttaagaatgtttt
aagatttttttattgtgaaatattcatagactcacaaggagttgcaaaaacagtacagagatttcctg
tgtatacataacccaactttccccagttacatattaaccaaatacagtatattaccaaacccaataaa
ctgacattggcacagtgcaatcaactagactgtagaccttacttggatttcacctgtttttgcacatg
ctcttttactgtgagtcattatctgttattctatgacattaaccatgtctatagatttatatagttac
taccactatcaagataaagaagtgtttcatcaccacaaagtaacttaaaggattatttttataaagta
atgacaaatgtgtcaaaagccattcctgtgttatatagcaagtatgttttgagttattaaaactcact
gatcatgtctttcagtgtcataactttgggtttccctccctaactataataatcctgatgaattacag
ttgatgaatatgagaatatccaactcttcctgactctataaatatattgactgagattgtaatattta
tggtgtcttaaggggcgcttgttttattatgatgatgtgaacatgttgagaatagtaagaacagccca
gtttagcaaacaggatatgagtcttctatatccagctcaatcgttgccccaacaggggacatctgcct
ttgctacttaattttccattctggaaaatgtgaagtgtatgagaatgaataatcgtctccgattttcc
agcacataataatctgaggagagcaggtacagcaatttaggagctgttttcttttggtttccaaaaaa
agttccgtccagtggtctaagttagtcgtttactaagtgatagagcaattggctatgctttttgaacg
gactgataattatgtggatgcagcaaataggatatagacaatgcatctactccattacagtaaaaaag
actctgatagcagttaatccacataccaggcacttagcttaggcacagttggaggaaatggaatggta
atagactgtagtatggcatgacaggagctgtagcttgagattcagaattccaactctgcctctcaata
tttgagtcctcatggccaagatatgtaaagtgctctgtgcaggtcttggcaaccatccaccacacact
tagtatgcaatatctatctttattagtcaaggatctggaaagctagttgatgagacaaatgatagaaa
caagagttcattagatgaaataaagtaataaatgatgcaagaatttaaaaaagatttagagaaggaaa
gggaacagaactcacatgcaagtagagcaactgtgtatcagataatgtgctagctgagttagaaacca
tgtctcatattaccctgaaaataattctgcaaagctgtaggtgttatttttttcatttgacaggtgaa
ttcatgaaggcttgaatatagggttaagtgagttgtttcaatgtagttattgattcaaatcaagatct
gaatgactctaaatatggtgctatagagatttgaagtaggataaataggatttgaaaaaaagaaaaaa
tatatagggaaaggaattggtacactgtagcagtgtcataaatgaagcttcagttgtgtgattccaga
tgatgtatgtgaggcctaatcaaacagctttgtggaatcaaaatttctgctcttgtctccaactgggg
acgagttggctcgggattaaggtgggcgaccttgggaagactagagtctaagcaggactttagtccct
cataagaattatatgaggatgtatatttgcatacaaattcctgggcccaccgagatctgccaaattgg
aatgtgtggtgatatcacccagggaaacatagagagctgttataattagtcatgaaatatttagtact
gaaattatagattatgttaaataatcacttataggggacatagcagggttggcaggttaaccatacag
caaacagggttgtaagtcagggcctagagaattttcaagaggcaggaattctgcagaatgaaggcctg
gtctcatgcagcaccatggacagctccgaggcactcttgtttctccaaaaacctgaaatcaaaaactt
tgcttttcatcatgcaacatacccatgtaacaatcctgcataggtactccctagtccaaaattaaagt
tgaaaaaaaaaactatactttcatttgaatacagttctcttcggctttaccagctctactctggaagg
aatatcttttactcaatgaaaggccatcccctgttaatgcctggccaggttctccttatcagtcattc
actatctttgtgtgtgagtgactaaacatataatgctatgtttagtggatggagtaagattacctttg
cagaggttgtactggcttacccctttggttcttgtagttttcttctattagagttttttccatcccta
ggtttctatactgttcaaatgggtttaagattcttgaaggtattcctctgaccttgtaatttatgctt
gtctcctagcacaacttttttttgtaaaggaggcaccaactatgtggtttgctggcgatggcatacac
aaatcaggtgggaggaattaatgagagcagcaattccaatatctggttcttcaagattaacttgtata
gtttaattcagcattctaaataagcctcatagatttaaaaatctagaataaacccacatttttaaaaa
aagttttatgttatctgtgctgataatgcacgctgtacataataaaatattattttcttttttttaaa
tttattattatactttaagttttagggcacatgtgcacaatgtgcaggttagttacatatgtatacat
gtgccatgctggtgcgctgcacccactaactcgtcatctagcttaaggtaaatctcccaatgctatcc
ctcccccttccccccaccccacagcagtccccagagtgtgatattccccttcctgtgtccatgtgttc
tcattgttcaattcccaatattattttctaagtggcagtggaagaaacatggaaagttctacttcatc
catcggtggattagaatttgtataccatgagatgattaattttcaaaaccagtttgaatctcacaaaa
taatgaccctgttttttgaaggacaaggcagaacaaggaactaggctgtgccacgttcaagtcacaat
ctctaacatttgttttgttttgttttgttttgttttgttttgttttgttttgtttaatctctgttgct
tgttcactttctcttgtaatctgcattgatttgctacctggctatttgtagattgacttcggctgcca
ggaatggaatgtttttcataaaggaacatatgccttaatgaaagtaccataagaagggagtagagtgt
gaccaattgcctaggtaataagtagtgacaacaatgatattattctagtataaatggaatcagttttt
ctttgcccagggggcatgataaagaaggcctggctggtatatactaggtgggacacaccaacagtgcc
tagaatgtcaatggatcaaacctgagggaaccagaagttgaaaagacatatcccaaaagaaagcattt
gatgtttaagggttggcttacttagaacacaatgaaaaatattactaaaattaaaactatgattttag
ctatttttaaatatgacaaattaaatagcagaacattttaataaaacattacttaaggtccacaattt
tctgtaagtctaatacatgggtcattaaaataaaaaattccccatgatttatggaatcagattttttt
aatacaacgaattctaaatggttttataatgccaattccaattaatatcctaattataacatgtcatc
cagaagggttaatgactaaattttattaatatttgttttctatttattttgatttgtgcagtttatgt
gtatagtaacgatagctgcaaattagataccattagcattaaataaggtatatattttaatagaaaat
taaagttaagtatttgagctagcctaaaatattcaacaacttaaatttgttttttgtggatcacattt
ttttgagacaaagtcttgctctgctgcccaggcttgagtgcagtggtgcattcatggctcactgcctc
aaccatccaggctcaggtgatcctcccacctcagcctcccgggtagctgaggctactggcgcacgcca
ccatgcccagctaattttttgtatttttttttagagatggtgtttcaccatctggtctcaaactcctg
agctcaagcaatctgcccaccttggcctcccaaaatgccgagattacaggcgtgatccagtgcactca
cccctgtgaaccaccattaaatagctaataaaagatgcatgtcaataaaaataaacaacttactagaa
tgattatgtgaaaatcatttattcttccaaagcatgaattttcaaacacaccttttgttactgtttta
agaagggaatcatttccatatatttgcatgtaaatcacttttagtctcagagaactttccataaaagt
ttttttattactgctgtaaccgatagagctagtggactattaatttaaaaagctgtacataaaaacac
atctatagctcaaataatctaggataccttttagtttggggaaatgtagatgaaaatgaagtaattac
agaatccttgttaattttcagatttagacagtctaggcaatatctttcaggaatgaagagatatgtgt
tttttggcatcttggtagagtatattcccattgtaattcttttgtgaagtctagaccagatgtggcca
taaaaatagacccctactacaataatatatttcatagataatccaataaagtcaaatcttattgcagt
aggcttagaactctgtttgcacccatggaatttatatcagtttttggcaaatcctttcatctctgagg
atactttttcatctcacatataccctattttctgaacattttgccttcaaagtatacctcatttatca
agaatttctctttattcatctgacttatacaagtggcaataacaacgtctggttcccatgaagtaacc
agtgaccctttgaaataatatagcgctggaagaaagaaaaggaaagggagactgatcattcagcaact
ctttaaaaccatgtcaccgttaaacacatagtttattttatcttttttttagaattgtgaaaacctat
attagcatcttcacggatgtctcctttgtttacatccccgcttctgtgccttgcctgcagtagaaaaa
aaaaggacatgtgtatccctattccccattgtcttctcattctacatgagaatgagaattcttttaat
ttcttctctatctacatgaacccacttccattatctgtttgttcagttctttaaatgccctgaagcta
gctctgtgactgggcagttgaaagttctggacttagcatcaggttaatttgaaaaatacttattgagc
caccaccatatgtcagccactactgtagatgttttgaatgtgtcagtgaacaaagcagaaaagatgta
tgccctctggattcttgggggtctcaaatagtgaaagacagatacgataagtatattgtatagtatgt
tcaaaagtgataagtgctgtgaaaaaaaagaagaagggtaaaataagagatggctcatgctggagtac
attccaattttaaatagggtatcatggtattcttcattgagaaggtgacatttgagcaaagatctcaa
agaatgaggcatggggttgaatcatgtagatatcagcagtaaactcattttgggttcagtaaacagtc
aatgcagaattcctaagccatcggtttatctgctgtttggggctggttatctgcagtgtggctagagt
gaagtaagtgagagaggtttaggagagaatgttagtgaggtgagggtggacctttgaagccattgtaa
ggacgtttttctctttctaagtgtgagaagatgatgctgactgagaccagggtgataagaaatagtca
tattctgaacgtgtttggaagtggggccaacaaggatttctggatgaattggataaggggcatgggag
aaaaatggagtcatgaatggctccaacgtttttgctctgattaactggaagggataaagttgccctaa
actgaaataataaagactatagatagaatggggcgattagggaggcattaaatttggatatctgttag
acatatcaccagatatattgaataggcaattgaataaatacctttagagttcagcaaaaaaggtccag
gttggacgtttaaatttcggaggtgtttgtataagataacatttaaagctgtgatatcagattgtatc
actaaggaagaatatagatagaaatgacaacgtgactaaggactctaacattaagaggtggattgaca
aaggagaaaacagcacaggataatgaaaaggaatgatcagccaggcatggtggctcacacctgtaatc
ctagtactttgggaggccgaggcgggcagatcacgaggtcaggagttggagaccagcctggccaacat
ggtgaaaccccatctctactaaaaatacaaaattagctgggtgtggtggcacacacctgtagtcccag
ctgctctggaggctgaggcagaagaattgcttgtacctaggagacagaggttgcagtgagccaaaaga
ttgtgccactgcgctccaacctgggcgatggagcgagacttcatctaaaaaaaaaaaaaaaaaaaaaa
aaaaaaaaaagaaaagaaaaggagtgatcaatgagatgggaagaaaaacaaaagtgtgtggtgtcctc
aaaaactgacgttctattttcaaaacctacattttgggtctccttttactatatcctgactttctagc
tatataaccaaaaggagaaagcagtaatttttttagatataacatgttaataactctaagggtattca
atgaatctgaataattcagtggtataatgtgaaaaaatatagtattcataggaaaaggaacagaagtt
agctcaggaaatgacttgaatgaacaccgaagccaaatctccagcgcaggtccacgtattatttgtct
cagtggttgaattagcagcaagattccttagtaggatgaaaaaagatgttgtgagcatctgtatctac
atgactgaattaaattcctccaacaatgaaatgtagttaacgtagtatctcgaaaagaaccctaagtg
gaattcagggaacctaaattccaaccatggttttgctgctgactgattgcattcacttcaaatctatc
attaacctccttgtgcctcattatcctcatttcaccaaataagaaaaatgaaatattcctccttccct
acctcactaggatgttgtggatttaaatgtgtgagaagtgcttgagatgcataaaatttgatggagtg
ttttattcatgaattcaaggcatctgaagtaatttgaccatgatggacagttgcttccttgcacattt
tttagagtgacatttccgttactgacccacccatttatgcaacatgttgcctaatctaaatttaggtc
aaaacaaattgaccttataggtaagcattatatctattaatattgtatttttgtattattttataata
ttcatcattcacctattttctcatgcaatatatgttactgaacacatatagattaaaaagccttcatc
cctaaataacaatgatgggaccttccatttttatatccctctggcatttaaaatgtgcttttatagcc
atcatctccattgatctctcagtcccttgaggttgatatgacagatatgctttttccattttaaaatt
acggaactgacagtctcagatgactttaccctccaactactgtgtgaagaagcagggtctggcactga
ggtcttctgacatccagtgtagagcactatacttcacaatatggccattggcttactttattacaagc
actaaatattttccactgaatacgtaatacctagaggagaatgtcgtgtaaaacagcagcagtagaac
agaggattaaatgacccattttcttgaagttatcttagttttaaagggttttttcttcatcactaatg
accatccctgactaagaaattattctcataatacatgataatatctgcgttttccaatgcgacaagaa
tgttaggatgtctatacatgatcttgacaatccctagctccatcacaatgtgtccaaattcattttat
ttggctagacaggcatgtagtcttactttcaatggttggctctgctggatgctatgtgatctagaacc
tgtcacttaccccttctaaacttcaggaattttttatccttaagataacaagaaaactcgtacctgtt
tcaaagagctgtttgttcaatcacctatccattgattatcttctatatgccaaatgtttttctaggtg
ctgaattacaggaatgaatcagaagcaaaaagttcttactctcaaggatcttatatgctaatgaaata
gatgttaaaaaataacaatttttgtttcattttattttattttattttgttgagacagagtctcactc
tgtcacccaggctggagtgcagtggcacagtctctgctcactgcaacctctgcctcccgggttcaaat
gattctcctgcctcagcctaccgagtagctgggattacaggcatgcgccaccatgcctggctaatttt
tgtatttttagtagagatggggtttcaccatattggccaggctgttctcgagctcctgacctcaggtg
atctgccctccacggcctcccaaagtgctgggattacgggcatgagccagcgcacctggcattaaaaa
gtaataacaatttttaaatatcaatatgtcttatacagaaaagtgagcagtgtggtagagtgtaactg
gaatgtgagttgagacataacaccagacagagaagccagagaaggacttttgtttgaggaaatgacat
ttgaaaaggaacctgaatagtgacagaggcagatacctaaagaatatgttccagacaaaggaaacaaa
aagcgtgcaattgcatagtcaacttagcctacttgaggaaaagtgtgagtggattttggtgatggaga
ggtaagtgccaggagatgaagggagagatctggcatgcatcagatgatgtgcagtcttccgggacgtt
gtaaagagttgggctttttttgtttataaattaaatgttaagccattggggtttttaaccagaggagt
tatgtgatatgatctatagttaaattatgtttgttcttggatggagtgtgcattatgggaatttatac
agaaacaagatttcacatatatatatatataaaactcagtgtcaatagaaaataataaaaacaaattt
tatccattgataattctggcattgatagtagtgggtatggtggtaataattgtgtgtaacactcaaac
tttctgaaaacctacacttgatctgtaaatccaaaagtatatgtagcaaaagccataatctgctctta
tttctgcaccacttgcaccagtgtggagtgataaggcaaattattcaggcacctgtgtaagccttcag
tgtcctcacccccttgttataactctccactaatattacattggtaaagacgtccctgacctatatgt
cactgagacctcaaagaaaagagcaaagctaaagcgtaagggggaaaaaagccagcttaaaaagactt
aaaggtttctgggaccaaaaaaaaaaaaaaaaagtctttgaaaaatgagaaaggaaggatagaagaaa
agattctcctttggtcaatctggccaacctttggaaataaaaagtattgtgttgcagctaataactat
ttgtcactgcaggcacttgctgatgtctgccctttaaaatgacccaaactcgttggcctcgaaatcag
aagccaaggaaaaaatcttggacataatgttttctgtagaattaccaattttctctctctctctctct
ctctctctctccctccctctctctctctctctccatatctatatatatatagatgtatatatattttt
tctgtaggaactaccaattcctatctatagggactgattgagaagtcccttatagcagtttttctttg
gcttttaggatgcaatgattattggtgagaataactctttcatttcacatttgtcattggcttatttg
aatgtaatcctgattcaatcgttatgatctcctttaagtaggaagagaagctggtattacattgtagg
attttaattttgtactcatgaaacttttgaaaaacattactcatactcttctgactgtcaaattggcc
tctaagaggtccacatctcaagaggtatcaagcattggtaactattttttggtgttgttttctcatca
taaaatgtacttttattaggtgactttggaaattttattgaatcaatgcatgacactgcctcattcta
gtaatctgatgaagcaaagctgaaaaacaaaatttgaggattgtcagtatatatacttttatttgcag
tcaagagttatgctgcaaaaatggtttattgaagtaacaaaattttagctgatatattaatctgaaag
atacagtatacatttttagtatggaaaagatgaggaaaaggaggttctctttcctctaggtatctaga
gcaaactgtaactgtccttggtatttaatttttggctaaggtactgagattagaggtggggccttaga
tatgattaattgtcagactgataagctagatatttcattgagtttctgttgtgctctttctttcagat
cctctgttcgatgctttgttataaagatttgggcatttcaaaatcttctccatatctggtgtctttcc
aaacagcaggtcatagactttacacaaagaggaacgacacaggttataagtagaagtgttttaaaccc
tgagttcctatttcagttttgctttcttaaacatattttccttatgtgataaatgcgagtgttgaatg
gtgataaataccacccataggctttaaagcctaaatgttgaatttgacactgagagtttaaaggcatc
atgaaaatttctccagaactaatgttcaagcaatttaggttttacaggcaactcaatagttttgaatg
atgtagttattttgaaaaagtcaccataaaacgctatgtttagggaattggtactttgcatttatcag
aagattgtaaatgtcaatcgattggcttgctatttggaatataattttttaaattatagttcaaatca
ttaggatttaattcatgattttgtactacaaactaaatctatgaaaaatatcagatatttattttaaa
ttagaggcatgtaaaggaaaatataaattttgaaatgccattttactggatttttctcttcagcccac
cctaggcatttgttacataaaatatttctgaggaagtcttccactgattttgtaaacaaacatgtttt
attgaacagttctttgttgactagattaacattgaccattgtatgcaatgcattctcaaaatcttaga
agctggttttctttttaatcatataattttacttgttttacagtgaaattaatgcatgtaaaaagtat
acctatatagaaagttaaaagaatattgctaactagttactatacttccaaattgcctattttctgtg
tcttgcattggacagtagtgattacctctaaaagaaaatggatggtctttgtttcattgaagggatgg
ataatggacataactggcattcttgagcaatgcaattgcaaatacatgtctttgcatttatggtccaa
tcatcttcttactatgatagcatataattgaaggttcaaataaatgcctcgtcccttcctgtggcata
ttaaagagaaagaaaaattagaaatactttcaaagctacctcacatactaatggtagagttgtttgag
tatttaggtgatttaacaaagctgatgtattttattatgcttgatcattgaggaaaatttatttatcg
gaatgcttttgagagcatatatattgtcagagataaacacagctggatattaaagaggtaaaaacaga
ttttattcaatacctcgtgaaattaggggagagctgagatccattctaatttgtgcagaggcgacttg
gttgttttaaggcaagaaggagggagaaggagtgggggttcattcgagttagagaagtaaaaaagtac
aaagggctggacagtgtaaatgtgattaggccagctgtgttagctggaagttattgaagttaggattc
tatcttcccacagagaacaggagacagaggacttatccttcttgatgatgtcatttgaaaagaatggc
tttcaggtccttgagtgagagacacttctgatttccaagagctacatgttcacaattgtaagcccttt
tgagtaaatgttctaagaaacggaggtaagagtcctatcaacagatgtgtgttggctagaacaaacat
taaattttcctggcagcactgagctttctcaagcaggcacttaagggaaggctagggtcatcctaggg
acatggccttctggggctagaaaccatactagagtttagtcaagtcttagtgcaagggtttggacaga
gttgttaagtgctgagagttctgtatttctcactgtcacaaaggaagatcagaagctcctgatacttt
tttcatcagtacaattgaatatataaatcctatacacaaaaataaactaagcttatacaagcatattg
gtcaaggaatgttgctggccttattaattagatagcccagttaaaagaagaattttttaatataatta
atgttaaagtaggatgatagtatataaaacgtgtctactgtcctgaatacaaactaaactgtttggtt
tagcatttacctcaagatctcttaatatcccccaaagggtccctaaaaccacaacttatctttgtgct
catgaagtagagaagagacagttaatagacatttctagctgatagactgttgtagagcagagaacgct
ctgtgtttttgaaaattaaacatatgaatttgcccctcttcccctattaaggaagaagagtttcttaa
ttgtgcgaacacatcaagtgaactattcaattagatttttgtgacccagggtataaacatctggttaa
ggttacatatttcaaaggaacaaaacactagaaactcttggttttaaatctcatggctggaggataat
ttgcagcagagatttatctggcaagcatacagaattgctgagactgttctaaagatgtaagtgtgggt
gtttgtgtcgtgaaaatagctgtttacatctattaagtggataccgatggttgaaagtgccgtctatg
tcaagtttttaccaaatcaacttttgcctcactgtgtcagaccattttacctaatcaacttggactgc
taatgtcctttcccctggcaccactatctgtctcttttgcaaagcacagaaacggcatgcatgattgt
agtttataaaacacatgtaccaatgtggtctacagcttctgttgagttcgagagggtcagtttctgta
atctcttctggcacagagtcaagaacagcttcactttcctcctgctacctctctacccgtaagtgtga
acccatcactttgctaacactcaggaaggggattacacaaaatagagcaggagccctctgacctgaat
atgcatctgagccctagccatagagcttctgattcagtagatctgggatggggcctaaatatttgcat
ttttaagtgtataagtgatgctgatgctgctggttccaggaccacattttaagaaatatcgataaagg
tggagaattaaactgcagctcagaagacctgagttcttgccccagcttgacttttacaatctagcaaa
tggataaaactcgcaggacttcagttctcttcatctacacagtgagtggttagattggctttgtaatt
taaaattaaacagggtttgattctgattcactacacaaggttccaaagaaggaatgatatctcctttc
atttcttcactttgtcttctgtccctaggtaatcttatctatgttcctgatttaacctaactaatgtt
tctgcaaagcttctaatatttacatctccagccctgaaactctcatttgaatgctagtcttatataca
tacccccctgcctaattgacatctccacttaaatgtatcagaggcaactcagactcaacaaggaccaa
actgaatgttcgaccttgtccttcaaacccgatacacatccaggttcctccatcccagtgaatgacac
tatccagttaagcaagccaaaagtctggattttttttcctcactcttcctcactgtccgtcaactacc
attattaaatctgtcacctggtcctactgatttaaccttctcaatatctctacagtttttctttatgc
ccattagtatcctagtgcaagctaccatcgtctctcattggaattaacacagtaacccccctacccac
cagactgttctgcctacagatagtgtgatatttaataaatataaatctagccttggctagatttctcc
ttcaaaaggttcacattaattttagccttaaaatggtgtgcaaagctttgcatagtctgtcctttgct
atgttggcagtattttttactatccctctcatctgctcattctctgtactccaactacactaactttg
tttttttttttttttagatttctctaactacagtgctgtaatctctttttcctttgcacgtactattc
cgtttgtcagggaatctgctcactgtctccacccactccacacactcacgttttcctgcccgtcttac
cggtcttgatcggttgtcacttgctcaggaaggtttccctggtcaccccctccacaaattgaattaag
tcctcttgctgcatgctgtcctagtgctctttattttcctctcctcatccttaattcagtttgtaatt
acatgttatttgtgtgaggatttgattattatctgtgtcacccactagatattgggcattctttactt
actcaccactgaattcatagaaccacagtaattgtacacaacaaatattcaagagaaatttattgaat
tgatgaatgaaaagttgtaccttaacatgttcctgacatgtatccaaaaaagagctcccctttggggt
ctattaggactttggacctaggtaaacgtaaccctagtttcgctcaggtttaaacagtagaaagtaat
tgggtctcttttgcatgtggctttcctaagggctaaccctgtcttcggaatgagtcaatacagcagag
ctgttgaaagcagactctagcttcggacaacgttggtccgaatcatggttccgtcatttcttagctgt
gtgatttagaataaattaatgttttaaagctttgatttcctcttccttaatctggagatgctaataaa
gccaacttcgtagaggtattgcgatgagtaaataagcataatttgctgtaaacaccttgcagattgcc
tgttgtatgctaactaatcaataaattgaagctcttaacatcattatattagatatttccagcattga
gtatactatcaggcatgtggtagaagctcaatataaagttttgttaaattgaatagattccatatatg
gtatttctacagcattatgctccttatttaagtgtctctaagtattttttaagtatcacctcacaaaa
gacagatgtttaattcattacacatgtgaattgttttagatagaaaataaaataaaaaattcaaacat
tgaaatcaatagtgtaccttaccttaggattacaccataaaatttctaccaatcgagaataaagtgta
cagtctatttcctttctaatacttttaacgcaacaaatgtttattgaacacttactacttctaatcta
tgacagacataaagatgaataaagcatgccacaatgtttaaaggagctcactatatcataagaaagcg
gattcacacagacaactctataagataaagtggtaaatttaggctggcctgtgaaacaaaggattata
ggtatagttaagaggtggaatttattttacttcgaggatttcagttacctttatattctttgtctaac
ctttcatgtttctctttcttcagaaacagagcacctttttcctgacacattcatttccccctatggag
tagagcagttgttttcaaagtgtgggtcccagatcagcatcacggggatggttagaaatgcccattct
tgagcctcacaacagacctactgaaacagaaattcttggagagtggagcccgcagatctgtgatcaag
ccctgtaggcaattctaacgcacactcaagttaaagaaccacgggaagaaaggtccatcctgtaacaa
gacagatttttttcattagcatcaattttgatcatttatatatatatatatatatatatatatatata
tatatatatgcatgctcacaaaaccattcaccttactaggttttagtattccccttcctgtattcatg
tggtatgtatgtatacaagatgaacacacatttacctgagacaaggtaagactacacatgtctcattt
ggggaccagaggctgtaatcttactcaaggtcaaagcgtcttcactgctttctttcactgcttttcaa
aagtaaaatttccatgtaggtgtcatttgttttctttttgtgttttagaaaaccgattaaggggtgaa
gtctggctaaacttagtgtcaggacatttacttagataaaattattttaatttatcttgtaatgttca
atgtgagaagaaaagtccttatgagtagtgtattccttaaataacaacaatttaaaaactaccactga
agtctgtcagagtagttttgcctcatttgtctagataagagaaaaaaggttcacattagggattgcaa
tttgtctgccaaagtgcagtttatttattcagaaacatttagagaggaatgtgtcagttctgttgcag
gcactgtgctgtgacggggagctcaagatgatctcaaaaaatttcacagatggggtgggcagggggca
cagagagatgtatttagtggttcagatactatttagactgtggccagcatttctctaaatgcaatcca
gataacaccttacagaatcatctgggcagcttgataaaagctgtagactcctacccttcatcccaaac
ctattgaatcagtgtctgtgtgtgaagacctagattgtgactggtaattataccaaagtcttagaagc
aactctaggccagtaatactcacatcagaatcagctggagggtttgctataccacagattgctaggtt
agccttcagagttgctggtccagtaactttggtgcaggtccagattttgcatttccagcaagttacca
ggtgatactgatgctgctggccttgatcgtgctttgaaaaccactgctttagctacgctataggaaaa
accatataaggcttttatactggccaatgacttcacaggcctgaattttagaaagcccccttctgcag
cttggcctatagattcgaaggaaacagaactaacacaagaaagctagttaggagctagttaaaaatca
tcctgacttgccaaggaaaggtgctgaagacctgggtcacagagcaaatgcaaaacactaggactttg
tccctagttcaccattaaatcaacttattttctcttaccccctcatattcacgtttactccttacttt
gtagtggttggacaaaaatcaaataaatctgagaattctaaaatgcacacccttgtttattttctaac
tcaaatatgccactgttgtctgtgctctgtcaagatttcaacacatctttttctcctgtttgcttttc
cttttggcatatagtgagtgtgtgtatacacacacacacacacacattttttttgactccttccaatg
cccttctgctctccgcagatacacttctgcattctgaataaaaccgaatacatatatatatatatata
tatatatatatatatatatatatatatgcacacatattttgaaaaccttatttgaaaagaaagctttc
ggaggaaacgttatttagccacttaatcgagtcttttactgagggactttttgtcgtcccctaacttc
ctgtcagcagtccacaggcagcaggaataatgtgggagaagatcaacaggcttatttcaggaggtcag
gggccagtgccaccacctgcaggtggagacatcagaagcaggaagcagcccaccagctgcagggagaa
ctccccacagagcctaaccaagatgaagggacttgtaaatttcaaccctcccttttggcttttgtgct
aaaaatgtgaatattgaggtctgccctgattaagaactagatacattcctctttgtgactgccacact
tccttagcgtattcattttttgtctttcgatctcaagttattattttcaaatgcattgcacgtatcta
ccatggataccattgcaattggaaggagcaaacgttttgtatgtttacttgacaaagagaagtgactg
cccaagccacacagagttctgcacaaatcagtaacttctaacgaacgtttgcacttccgggcttgttc
tctacctatttcagtcgatgcatttgtattatttacttcaaactccaatactaataatgcctcaatca
ggttgcaattgggatttgagcagccagaatttcagaaatttggtttggtccatatctgtgacaggtca
gtaaatcagagaagcaagggtttggttgctattataatacattgcttacctatcaatttagttatcag
ccaaggtggttgttatcatccaaagtggctcattaaccaccttggagactcagtatacaattgcaagt
aaccctggaagttgtaaataatcccaactgaatttgtatgagtttggtaaggttaagtggaaaccagc
tgcttagggccttgattataaatgaagttaggagtggaagaagtaacaaaaccccaggcaaattcatt
aaacattttttcccttcaactttatgctcacgaatgtgttgagactcttctgaatccataaaacacct
ttcagcatcatctgggcagcttgataaaggctgtagactgcctgcccttcatcccaaacctactgaat
cagtgtctgtgtgtgaagacctagattctgactggtagttataccaaagtcttagaagcaactctagg
ccagtagtactcacgtcagaatcagctggagggtttgctataccacagattgctaggctagccttcaa
agttgctggtccagtaactttggtgcaggtccagaatttgcatttctagcaagttaccaggtgatgct
gatgctgctggccttgatcatgctgtgaaaaccactgctttagctaggctataagaaaccatataaca
tggacaaggcaaatgaaaaggttggaattcttctgaatcccaacacatttgtgagcataaagtcgaag
ggaaaatgattcttctgaatccagacacatttgtttaaggataaactgttttttccttctgaaaattt
aatgtctgattctcgttcattcattcatcaaaagttatcaactatcaactataggtaggaactgtgca
atatgctggtgataaagagatgaaagacacagcccctcccttcaaccagctcctagttgaggtggcaa
gtcagctgtataatcaagtaattgcaagactgtgcactgaaaagggtgaccacagggtgtgatggcca
cccagggctgtggaatcagtcccaaaatgaagaatgaaagcagggaagggtaattcagaaagaagaaa
cagttcgcataaagacccatagataaacatcaatcagatgtggttaagacaaaagtaagtttctggag
gctgaggaccttctcagctatatgtttgcagtgcttggtatagggctttatgcatctacatggaagac
agaaagggccacatcacagtggacaaggcaaatgagaaggaggcagtatcagaagatgagggtacacc
ggagatcctagttatatatgggcattgtgttcatctcaggagttactgagtaatgggaccttgactca
aatgaatctcaagtctgtttttgcctaatcttggttttaggactaggattagcatacaaccgcactag
gagcctagttatacgaaaggctgcattgcggacctgatacagttcaatatacatactgtcaccttgca
aatagggttacgttagttctcaagactgccaatcctctgtgctctaatccttttggcttttttttttt
tttttttaactgtctcactctgtcatccaggtgaagtgccctgggatgatctaagctcactgaaacct
ccgcgtcccaggttcaggtgattctcatgccacagcctcccaagtagctgggattacaggtgctctgg
cgccaccaggccctgctaagttttgcatttttagtagagacagggtttcaccatgttgcccagactga
tctcaaacgcctgacctcaagtgatctgcccgctttcctttggcttttaacactatagagcaagggtc
cccagccctggggccacagaccagtacaggtcagtgacctgttaggaaccggggccccacatcaggag
gtgagctgcagggccgccagcattaccacttgagctccaccttctatcagctcagcagcggtattaga
ttctcataggatcacgaaccctattgtgaactgtccacacgagggatctaggttgtgtgctccttatg
agaatctaatgcctgaagatctgaggtgcaacagttttatccccaaaccatcgcctcccacgcacctc
tccccacaaccccacccgcccctgatccatggaaaaattgtcttcctctaaaccagtctctggtgccg
aaaaggttggggattgctgctatagggcgatggttttcacatttgatcctgcatcaaaatttccaggt
gactcattaaaatactgattgctgtgccccactcgtaggagttctgataaggtagctgtggggtgaga
cctgagaatttacttttctaataagttcccaggtcatgctgatattgctttgataaccaaagcaatat
cagctttggttatcaatatataaccaaagccacatagagggggagaagttccttgggtttagcccagt
gtttactgcgaccaccaaaattgctggagcttaaccatggctcagagagttatgttctgttcactctg
taggctgctattccctgtcaccttttgaactatgatggaggggaagagctgccagctcaggagatttc
acttttttctctgcataattgaaaatccagaaacacagggttttgggaaagctatagaacagatcatc
agtgatcagtgtttaataaagtaaagcaataaactttactgtgtaaaataggatactttattatataa
attttgtccccttcccccacctcacaggccaataaaataatatacttcttgtccctgggtgtaatgtt
attggaaacctttgaatgtaggagaggcatgggcttgtaagttgcagaaaactgctagcctaggattg
agaatttcatggataatccaaaaatagatgattttacagttataagccttacgtgaacttgaggtaag
aaaacacaatgcctttatagtcttctcagttgctccacatgccctctgagattctgttctgcccagcc
tctctggttgtcacatctctgggcattaacagaaagttcacatactctttgtctctgatgataatcct
tctaggtccatatagaagatccctatccaaaccatcccccaaacaaacctattggttaaatattttct
ccaccgaaggcactttcttagattctaagtgccctgtaggcaggcttcctctctgatttgggagagta
caaattgcgacaaggttaaatcatagcctgggaatttgacctaaaattcactcttctcccatatgcat
tcatgaaccttctgctggtttttaaaagaagctacttaatgtcagctcgaagaggttggaaggggtta
aaaacatgagcatggcagtaagaagatttatgaaggatctgagaagattatgacttgatcagatggta
ttttgtcagctagccacatttgtgaagacttgaaaactagggaggcttgtccttctaagagggggcac
tgctgggacctggattctgtggaaccgtattagtagaataaacaataacctttgcttgtatcaaatga
acttctattctcatgtgtcttttgacatatttttattaatcatatcactgggacctccttgctgaaag
atatctccgttccccattctgatgactcccaactaggagtgagatcaaatgaagatggcatggaccat
ttctccatgtgacagctctctgtggttgccttttaacacttctaatgccctttctcttaagaattccc
atttgtcgtctggcactggtgctgtgatcaataaaaatgtaatggagtgaggcttagaaacatgagga
aatttactcaagctatccatttattgatgtgtccatttgtgttgtcagggaagaaaaactttttcact
cccctcttaggttcattacttggggggctgcaaattaaactgacgacagatagattggcaatagaaaa
gacaaagtttattcagagaagtatgtgggagctcacagaaaacatagctcaatgaagttagaatttgg
ggcttatgtactattttaacaagggttttgaaaagaagagtgttagaatttcaagccacaaagttggt
gggaaatatgaaagaaactaatgaaaggtaatgtttgttttagtaaagtctgtttatgtaattttctt
ttcccagcgacaacttctcatctctggtgacaggagtcactctttacccctggtgcaagaaactttcc
ttaaaggaggatttaaaacagttgaattatttcagaaatctttgcttttaggcagatagggggagtac
agaaaaagccccttcccgtatctgttgatcctcaaatggctttagctcaaaacaatttttacatcacg
atggcataatgtagatctcttcaatgtgttcatttattccacagatatttgtgaagtacatgatatat
gccaggtacttgggatacaagaatacataagtatgtccctagtctcgtagaacttacactctagtagt
gagctagagaataaatgatattatttattatatgcatacacatatgatttcagatagtgatccatatt
ggaaataaagctggttaagggaatagaaaatgatattgaaggtggacttgtttagattgggtggattg
gcatggcttctctagggggcagtatttgagcagatatgagagcagatattctccaatttgggcaaaaa
cattccaggcagaggaaacaagggcaagggcactgagttcaaaagagacttgacctagccaacaaata
gcaaggattccagtgtaagagaaggtggggaaggaaggaggtgcaagtataggcaagggcaagatcac
acgggatcttgcaggccgtgataaaagaatttaactctttcataattttgacaggacatcattgaaga
atttagaaaaatagagtggagatacctgatctgctttcttcaaagagttcattcatcattgctgagta
gaggttagactgaaatggaagcaatagtgaatacagggagatagcacaggaagccacgttactagtcc
acatcagaggtggttcagactagggtggagtggtggggtcagttagagagctggtatttaggatacat
tttaaagacaaagctgacaggatttgctgtgatgaattagatgtaaagtatgagaataattgagaatt
atttctaagttctttgctggggaaaagtggaggaggaaaaagttagggtacaaggtgtgatgaaatca
agagtctctcttattatcagagtctcattagatatccaagtggaaatgctggaaagaaagttgggtag
atcagtctgaagctgaagacagatactgtgactggaataataacgtaagagttggccggacacagtgg
ctcactcctataatcccagcactttgggaggccaggataggagaattacttgagcccaggagtccaag
accagcctgggtaacacagcgagacctcgcctctacacacacacacgcgcgcaaaaattaatcgggtg
tggtggcacatgcctgtagtcccagatactcaggaggccgaggctgaaggatcacttgagcctgggaa
gtcaaggctgcagtgagccgtgatcacaccgctgcactccagcctgggcaacagagtgagaccctgtc
tcaaaataaataaataaataatgtggcagtcataggcccttagatggtttttaaagacatgggactgg
atgaagtcttctaggaggagagtttgggaaaagagcccgagaattgactgcacctttcaaaacaggag
gaagaaaaaaaatactcaaaggagacaaaagcaacttctgtgatttatagagaaaaccaggcaagtgg
gatgaagaaagtccttcatgatagaatcaaaaacagtgtcaaatgttgaaaatacaattagacaaaca
caaaagaatagaccattgggttttgcaatatggagctcatacttgaccttgataaaagacattttcac
tggaagcatgcatcaaaaaactatttgtggtaggttaaaatgtagtaggaggtgaggatatacagaca
gtggctttcactgtgcagatactgctgctcatgcactaattaaaagacatttgttgagtatctactat
gttgtatccattgctaaatagtaacagctgggtttagtcaggtagaacagcatcaaaatcattatagt
atcccaagataggtacagtaaaatctgtgaaggaatcagagtagtctcttctccaacagagcgtaaga
cccagcttcacggagaaggtggtagattagctcatctgggaggctgagtagaagcttgtcattataga
gggagaacatcagaagtgtggacaacagcttgaataaccttgaaaggacaaaagaggacggtctgccc
tggaaatattaagaagtctcacatgattagacacaagatattaggggaaaggcataaggtgaattgag
tcaatgaggtcaaagagaagctagctggaggaacaggcgatcataaaatgagtaaaagtatatattca
aagattctttttagaagggctacacaggatggataaggggagagagagagttgaggcacagagacaaa
ttggaaaggtgcaatcataaccagagacatgaaaaacccatagaaatctgatgtagattatgtggtcc
ccaaggttgaacaattaagtacgctttcagttgttatgcccatgatattaacatattttataactgca
ataagtgctgaagctaaagataaatacaaacaatgtaattcttattctgtgagaaaatgttgtagctg
gaagttaaacatgtttcttagctaaagaaaaatattgtgtgatctggattacttaatgttataattta
gcaacaaaatgttgacattgagccttgcataatcaaaaaagtagtctattcaataaccacattctcag
aaaaaaaacaagaaaatattagaaacaatgataaattatcgtagtaatttaattcagtattctattgt
tttatttggatttaggaaaggcagaaatgttgaaatattaatatatatccctgtaataatataatttg
tgtctgagaggtaggaatgagggcatgaggtcaaagtttgataatgaacttcaaagctataactatga
tcaggaaattaaaattggacaataaattcctagaatcgtcaggagttgcttgtgaaatcgagaaagga
aaggatatacacaaaaataaagaacagccaatgctctcaaaggagtctaacttttataatagtcttct
gtgttagagctgaactcttctggtttagaaggacactctgttgcctggaaatagggcatggaaaaagt
catcagagtcatgtcatctttcattcttcccatgaacgaaatcgaggccctgaaaagtcacctgtgtt
tgctgtattttattgcaactaagatgtgcatttttaaattgatacataataattgtacatatttgtgg
gatacatgtgatattttgatgcatgcataccatgtgtaattatcaaataaggatatttctgtatccgt
cacctcaaacatttaccattgctttgtgttgggaacatttcacgtattttattatagctattttgaaa
tacaaaatagattgtcattaactatagtcaccctactggatgcaccttgtttttaatatttctgaaaa
cagatacgtctcataggtgatggtgtcacagctgtgcattagttattattgcctgtgcaggtgcaaac
gtaactattcatattgttgtcaattaattaaatagttacatttatttatatgcgtttattatactaat
aaacacaatattgagatagttgagctctagttttgactctgctgttaactagctgcgttactttaatt
tacttaactaatttggctttcaaattcctgataagtaaaattacaacatgagtttctcctgctataat
agcctgagaaatcggtgaaacacatgaattcagatgttgatgctatttaatagcgggattccagatat
ctacttgccattatgggagggagagaggaggtggactggaggctgtgatttccctaggaggttgttaa
aattggccaggtgaggaaagctgagacagaccataaatatgaagcatgatacctagccctcagtgttg
aaagaaaatcaaatctcatctttgtggtctaaatatcagtatgatacaatcctctgtgtagacatatc
ctctgccctattgttttctttctaaaagctaaagcccaggtgtgatcacatccctccgttatttacaa
atttctgatgatgatgattcttctaatatctacattccttaccattaccatgatgtccaaaacctatt
ataatctattcgtctccaagtgccatgttgtggtcaccctatgcaccctctaaacccaccatatgacc
ttcccgctgctacttgaatacagttggccctctacctcgttgtgtctttgcattgcctatttaattgc
ctttccattctctaaatcactctttcgctggaccagcaacatcagcaccatctgggaattcattagaa
atatagatcctcaggcctcatctcagacctgcttgatcagaaacattggagagtggagatgagcagcc
tgtatttttatcagccctctaggtaatttgatgcacactaaagtttgagaaccactggtctagagcat
tcttctttaactctcttctaaaaattattagaatgaattcgagggacgggatctccttgaaagccaag
aacatttctttgtcatctttctgacttcagggcgtagtacactttttggcccataattaaagctcgat
aaatgcattctatgccaataaatcagctaatcaaatatattattcatgcccttgaggtatctgaaatt
tctttgcagaatgtaatatataactatagagtaacaagagaataatttattgccatagataataaaac
aatatcctctgtataataaatcctagcctctgctcaatgggcaaaaacgggactggggtttcagattt
taaaaagattattggtaattaaatcacctggagaagcacttgctgcagagatgggacttgaagcatca
taataaactgttgtttattatgattcggtcagagctgatggaatcacagggattgtgtgaggtatgga
aagtggttgacattgaattccaggctgcacagttgggacttgatatgataaccaaaaagaaagaatgt
ctggggtggtagcaagctctaaatttagacaatctaggcttatcctaaggagaatatagatacagata
actgaagtttgattaaagggaacctggtgtatcacaaatagtaaaaagctgtagttagtctatgcagc
tatcagctagccacataatacttttgggcaaatacattataaaccaaaagaatgacatggcttatctc
tgtaacaaagtggctcattgttctttattctactgttatccttaagaaaaaaattttagtaaatttgt
tatgctatactcaacttcaagaagggatagcgcttataaaaaaattgtttaaagaaacaggcctattt
ctctttgggagaagccacggagaaacgaaaagaatggaacgtgtgtttctgcccagatggcaataaaa
tgtagggtaaatttctgtcttttaaaactgtattttttccatccctctgtatatacacatatcctagg
actgttataaaatgctgcatgcgtatgtgaaaatggaaccttattgggctgtttgatggacctttaaa
atatatttgttggtttggggtacatactagctatgcaatataatccgcattatttcttatgtaaacaa
tggataaactgtttcacagtccagacatttatttggtcactgtttgtagaatgtctattttatttact
tctgaatttgtattccagagatctgccttcaatgttggatacttccactgtaatattctaggagatgc
tcactttctttttcagcatctgacacagtaccatctgcctcctcttttcttgccacaagtaataacaa
ttttataaaggaggatcacattacagaattataggtggtaaactttctaccaccagatttacccaaga
acctgaaacacattttttcaaaaggaaatagaatgtccttcttgtgactacatcggaattttgcttgc
agcattatgctttttttttccccctagtgtagctagccatgtggaactgaagccattagccagctcct
catcctataaatgctattacctgggaaaagaggcagaaaatatactctcttctccagttagagtctaa
aggaagagaacaatatgggtagttgtgtttaccacaaattgatagaactcctttattttaaatgctaa
aaccaaataacttgtttatatgacttcaacattgactatcacacactgttgcatgataacagagtgaa
aactacctctattggatttaagtggggaatctatgtctcattctcattctttttttactgtggaaact
agttgattccaggatcagccttagctccaacttgccacactttgagttttggtttttcacttgcattg
tcacaggaaacttctataggataaatcgaggaagattttactctgcaacgtgttgcagaattaaacat
ttaaagtggcaaaaccttcgtgtgtaggttgtctccccagagaatgtaaaaatgaattgaaggcagca
cctaataggtaaacgacagccaatcaaacaagaacaaatgaaatttgactggcaaaatcaaattgaaa
atgtataacgctgaatctcagaatataggaggatgcatagaaactaagctgtactattataaaagtca
tagccattgaaaaataatgactggttaatttggttttctttacctcatggatgtgaatggttagattt
tgatgttggtgttatttgacgtgtgtttgtcaagaagttgccttagtcggctcgcatttaggataaaa
aaaatattttaagaaatgtttaagagattatgttggagacattagaaacaaaataattatgcagaggg
caggactatcaaaatataatagaaaaattacaccgctcttttatgatttcctcctttttggcatttaa
cacaaaactttatgattacacacaccacgcactccagaaatgcttaaaggaagatgagaggaaaattc
aatagaagtagcaggcatttctgtgaggacagcagaatgatcacttcatctctgtatttttttttttt
caaatttctgtatctgtacaatgtcttttccagctctaatattctgtgatttggtaatttccgcactc
agattttctttaatgaattttgtatgatattacctatttttataccagatattacctggctctaattt
ctttttcaccctaggaaataaaagtatcgggtgaatttcccattttcttatgttattgatacaggtct
ctgttggatatccccacgattaactttcctgcagcatgttcgatggtggcttaaagaagaaaccatgt
atcagagccccttgtctatatagacttttagataaagagaaatacatatcacagaattattctgggcg
catagagtctctaaatgcaaaaaaaaaattgtattgtagctgttgattcttctcagatagattgagtg
tagagagagagcattccaaaaactgagcagaagaaacacagtctgaatcaaataacatgaaattttag
ctaacaagtaaataacacttttttcagaatatgcaaataatattggtttattatgaaaaatgtatagg
ctgatagatgagcatagagaaaaaattataaatatcttctttaatatcactttccccagcaaaccact
tttaacattttgatacattttcatgttcaaacatttcctaatagtcttttttcctgttatataaatat
gaattttaaacattcgtatgtttatgaaaaggcaataagatactgctcttttataacaggctttctga
acttcacaacatgcagtgtattctaacatgctccttgtgttcttaactaataaaaaacctcacgttat
ttaaaaaaccatcttaaacataattatccattaagagaagaggttggggtagagagtttcagactatc
aatatcaaagttatattttctgtaagtattttaatttttaagtgtagctataggtatatgattataaa
accaatagcagagaaaagataccacctttgaatatagttttccttggttccatgaaaatggcctcctt
tctttttgccagtccctcagtatcattaactcatttttctgtaaatgccatcattgtatcacatgtcc
tcaggaaaaggcacttttctcttttaagctagtgtttgttcttgttctaattttatggcaatttaacg
agtaacaatcctgtttctataaatactgtttcctaattaatctattgcattctatccatgagaattta
gatgactttctttgtaagagaaatctctgtagcatgagattcttctttgctcttaaatttcattcttt
cacatttttaaatgacctgatagtattttgttgtatttgtgctgattttttttaaccaatcttacctt
gttgaacatgtaagttgtttctaatatttgcaatgatcaaaatgtggatccaacttcactaaagcgtt
aagaatctaaaacaaaacaaagaacaaaaagttggctgtcatcttgcttggaccaccccgtgagttac
tattttcttgtttccggtcacagttcatcctaaatcatttcagtacacaaaatgttttttaaagtttg
ggacagggggtagagaatgtcaattattcctccaaggcagtcatatgagcattgagtatcatgtggaa
tagttgttacttgtaaagttatggggcatcaaacccagtcaatatgtttctggaattgaaaaagtccc
tggacattctaatgatactgttgttcactttgcacctactgttaccactactttgatctgtcaacact
gcccgtaatggttaattttgtgcatcaacttgactgggctacaaggtgcccagatatttggtcaaaca
ttattctgggtgattctgtgcaagtgttatcagatgagattaacatttaaattggtagactgagtaaa
gtagattgcccttcctaatgtgagcagacttcatgtaattaattaaaggcctgaatagaagaaaaaca
ctgaccctcccctgagcaaaagggaatcgttctgcccgactgccttcaaactgggacatgggcttttt
cctgccttcagactttaaccacaatattagctgttcttgtatctcaagtctgctctacttcgattgga
actacactatcagctctctcgggtctccagcttgcttgttcaccctgtataccttgggagttgtcagt
ctccatagttgcctccataattgcatgagccaatttcttaccacatacaaacacacacagagacacac
acacacacacacacacacacacacacacatataattatatatgtgtgtgtatacatattctcttattc
cttttgtttctctaaggaaccctaatatactccttattactctttctactgccttagagatcttcaag
gccaagagcgtaatcctccatcctggctctttttcctaatcattaatgatcaactcatagccatttag
ctcaactaaaaataatttgttcatgaagctttacactcccacatactgaggaacgtggtacctaagat
caaacagtcactgcctcatcaaatgcattcctcttcaaccccatacaaatgtccccagatggaactca
caccataaaaatattagatcccattgacttttctgctttctcaaggatcattgcagagcttgaaaaag
atggctcctccctttgcctaagcaggttaacttggtgtaaaagtacatgtaagatttggcacaaagga
aaataaatcagttttgcctgggtcctaagaaacatttccctctgcctcatggtaattgtacctgccag
ttgattgcattactcaagtggagaccatgaagtgaagtggtagaacaagaagaaatccctataatttt
attaagtatggtgaaaaatacagatatgtagagaaatgactgggattagatggagcaaaacataattc
gagatcctgatacaaattgtacttcctggctcaagggagggagcagaacattccctgctacatgggaa
taataataaatgcctgataaaaatgcagatatatcatagactacagaagctgaagtggattcttatgg
tcccctactcagacagcctctccttcagatgaagaaactgaagcacagaaagctcatcctagtgtttc
atattgaaaaacccattcaagtctattttaataacctgttaccaaaaatgagggaaataatttaactt
taatgtttcactttgcattacccttttcctgactagacttctatccttttcttgagttgagctcatta
actactatgaaattatggttatgggtagaggttaattttatacctgtccatcttctggcatcttattt
acactaaaaatcatttttaaatggcttcattttaaaaaatattatttcagttgacattttaaaagaca
catcatttatgtactacagaatatgcattttatactctcctttattaattttattattttccaggtag
accaatcaaatgaatcagaaattcttggttagatctattagacagcataagtatgtttttcatcatta
aattaagatgaaaacacaattttactttaaagtgtttgacgtttccagcctttataaagtcaacactt
aatcacatctgaaatttgcaggaaaaaattttgaaagccttcaattattaacattatttcgggagaaa
aagccactttgccgcagaactttcacttttctctcgtgaattaagtctgatacaaattattcattatg
gtgaagtttaaacataatagagtctagctacttccacaaaaatactattcaatgagtttctacattga
catctaactgaccttgtaattaatgttgtacacgatccttttattatatgctggattatcaaatatga
cttattagcagtataaagacacaaagttctgaaatgtaatttatagccatgaaaaggaactgagcttt
gtgtgacagttaaatttgaagagatcaggtgattattatgaagcatgaataataatgcatattaaact
cacgtttttgtttaaatcattaatatgattgttttagaagaaagtctacctctatcatatgggcaata
aaatgtgtataagagcaaacatttgtgtatgtgaaataactcaaattaaaaccagttttccacattaa
ttcttacagtttttaaaatttaaatcatttaatgtatcacacatagctttattcattttaagctataa
atgttacaatttctgtttaagctgttaatataagctttgtaagagcaattctgtataaatatagaatt
gtcattattcactaatagctaccatttatttagtgcttgttgagtgcaaaagtactgcactgagatct
ttgcatatgttctcttaatgttacaattcttacctgaggcatttctgtttctgctggaatatggtctc
tctgaattgaacaagggaggcatttttggttgttatgatgaaaggtggacactgctggcactaacgtg
tgttggtaagcgactagactcttcatgatgcgtaaacagtgtttcctcatacccctgcacattcaaat
agaggaaaaccttgtttatagttaatttcccctagaatgtaaatccatttaacatataaacacaaagc
gtgttttgtgtggatgttttttactggagcagggagacaggagaggaaatgcagttttgatagttgct
gaatttttcaagaatgcagcaattatagaacaatttctagaagtttcctaggagctcttttccatagc
agaaaactaggacttaatagccttgcgactcatggtacttgagtgttccatacaactcacctatattc
aggggacatttgaaaaattctacattaaaggggattcttaacataggcgcaagtgtctggcatcttca
ataggtcttctggtgtggccatgaaaacattcacacgtttcaaagtattttaaaataaaataaaacat
atattgttgtgttatgaattattttctttcttttttatatgatggttagatcactgtgcagacaagtt
tatgagatctattcatttcatttcagggtggtaaatgagggtgttactaaatgttggttctaaaaagg
gagacattgggtattacagaattcagaacagctctaagccctgtgcacatttagcattagaggacaca
ggcaaatctggcctccagtcctggcagcttcttcactatgtatatgatgttgggtgggttgctttacc
tctctagtttttacttttatttctaagctagggctattcatagttctttatcatgtggttactgtgaa
gtagcaaagcacctgacataattagagcagataaaatgctcaacaaatattgcttatcagaaggatta
tgtattacctcccgaaatacatcaaaaatatattttccaattcaaagaatatgtagtacaaaaatcat
gcctaaattaacagagttgcagtagcccaaggagagaagataatcattattgatttcttcttcctttt
tgctaagcagttctctgtctctgcctcctcagttgttgtccatcccactcccccactcccaagccctg
aactctgaggggtttgctgccgtggccggttctgtagtcattgctgtccaatgatgaaaacacaaaat
actgcaacagaacactatgcctgtcagcttagctcccttctttctgctaaatgacactcaatcctatt
cttttgttctaaaggatatcctaaatgaatagccactggggggaaaaaaggttatataagattgtgca
ctgtgtgaaactgatgcaaccagatcaatgatgtgaatttctcttaactatttactgggatctagaaa
caggtctctcaacttagcagtgtttacgaatataataggccttccttatacatacatctgaagccaat
ctgagtcaggaagagtcgtggtctgataaatattttgaaaacttgcatttgttctattaaagcaaact
gtttattaatagtgtgccttattttttaaagcaaaacatttataaacagtagtcattacaggcacttc
agtgtacqgagtqatcaattgttagacctttaggaatcgattgtttcgtggagcttcggcttataatt
gaaatgtcatcagaaggagtgtaagacatagcttcaggagaggccatttatgcgcttttgttttcagc
taagttatagagtcatcatgtgaagaaagattcttctcttagtaaaaatcctttaatggttggaataa
cacttgatatttaatatttctttctactttatatccacatttattcaagtgctaacgcgtgtggggca
gcaatgaagcactttattccaacattatagttctcatatctgcgtatgattatttttcatttatcgtt
agcatatatataatgatgacttttaaagtacactgtattatattcactggaataatgattagctatta
ataatttgaacactatccaggaaattactgaacatgtcctacaagataaacctcgtatgatattgtct
ccaaataacagtgctaaccaagaagagtgctaccaagttcaaaagtaatcacagggagtaacctaaat
gcagctccgttgggttaaaaatagtttctctaaattatatgttccctaagtttgagatcgatttctac
aaggggataaaatgtttttataaattctcagtgataagtcatgtgattaagaacccccaacttttttt
ccaaagacatttgcatctctgatcaaaataacaagatccagtcttagttataaattggggaattttca
tcaaaataaggagctactcgttgcataagaagactagtacaacttaaagccaatttaatttcaatgaa
tgcatgatcagctccattgccaattgagtgtttttcttattcatcagaagatgggttcatcatcgtgt
ttcatatcaactgttctcaaaccatattgcccatttaaataaatatagatttgtctcgaaattctaaa
ttcatgtcatatttcataaatagcctatggtcctatttattactttaaaatattatagatataatatt
tttattctaaagtaactgtgttatacaaccaaattattcatttaaatatgtgactttttaaataagta
aatgacttatttaagtaaagtcattaaaattttccagtctgtccttcatccacctgatctttgaatga
gttaggaacaatacaggaaactaatacaaacttaattttgattacaaaagatgaaatcattctgttat
ttattcaacacactatgtgtcaataaaatcttatactgtgaaagaattcgtctaagtccatttgctgt
tgcttgtaacagaatacctgaaaatgggtaatttacaaagaaaaggagtttacttcttacagttacgg
aggctgagaagtccaaggttgaggggccacatctggtcagagccttctcccatccaagtactaaccag
gtcgaacctcacttagcttccaagatcagataagagtgggcgcgtttaggctggtgtggctgtagact
tgttagagcctttttgctcatggggacacagcagagccctgaggcagtgcaggacattacatggcaag
aaggctgagtattctaatgtgttcatgtctctcttcctgttcttataaaatcatgaatcctactccca
tgataacccattaacctattaatttatgaatggatgaatccattcataagggcagagccctcatgatg
caatcacctcttaaaggcacaatctcccggtgctgccacgttggggattaagtttccaacacatgaaa
tttgggggacacatttaaactatagcaaaattgtaataaaatgttatatagaagcaatgttcttactg
attataattgttatattggtaaagtgttaagtcctctaaccaagggatatatttcagcttattataat
agttttaaatttacaattcaatatgaataacatctggtaaaagttcttttcaagaaatgggaaaatta
gaaatgtttagaagaaaataattcaataaatattaagttcaaactggattcatagtttatgtgaaatt
ctgggaaccaattgcaaggggagaaaatagttacaatagcaatggtgaggatgagaataagagcaggt
atcaacgttaattgagggtgtgttatagttctaatcgtgctatgcccactacatgacttttccctgtg
tgaggtttccgagcttcttcgtagtaatcctaaattgagctggagagaggctagggtaacttactcac
gctcatagagccatagagtagtaaaacctgtatttgaactctggcctgtctgacatcattctgtggtc
ttttaaaccaccactgcttctccatattaaaactccaaatctaggtgaaaagaagaaaactcagaaca
tgttctgcaacaaaatataacaaaatataatgtatataaacacttatacataatatcactaatatctt
tactatgaaaagactctgatacgaacattttacataattcatgcagaagtgttaatcacattgtctgt
gatgagctgtgtatgtatctgataaaattctggcaaccagacatcaactcgtaggcatagatctgtaa
cactaaatatttgcctcgagaaacttaaagaaataaagacaaatgaatgaataggaacatggaactga
gtacaagataaaatcctcctaaagcaatcgatgtacttgctgctgcgttattgttctaagcaaaagaa
gcatggcgaagggagatgtgaagctaaaaacagaatgcttagaaggagatgatagcaggagggaagca
aagatgggaccaagctcccaaaaggcgggctttgaacaaacaaaacagaaagctaagcctttgacgga
tgcacgggatgcaagaaactttagtcaggaaagaggaggcgaagaaaaaccctccaaagaaaaggtga
acaatattttaataggcaaattgacagatagcaagagatatataccatgctatgttttctcattgcag
ctgaagacaaactggggttatttatgctttgaaaaagcgtaaatctaaaaaacaattgtggaggaaga
agcgatgaaaacacgtgttaatacagaaaacatggctccaaggctttaaacttccttgtgagataaat
gcatttacattttccgtagtagctaatatatatatatatacatatatatatatatatctgggaaaata
atacacagtgattttctttctttttttcatctacttatgtgagaaaaaagtaggctatctgaaagctt
ttcagttaaatgaggaagaaagttaggtgatcttgtaaataatatatatgttcaagataatgtaaggc
ccttgtgtagttttcaaaacttatctttaatagcagtttcttctggggatggggtagttcaaagttga
aatgttagaaagatgttaactttttttcctttttacttctccctttcaggatggaattaacaaatttg
attacaaatagatctcagagagaggcaaatgcattgaatccagaagtaacataaaattagatcatgtt
tagttatgcccgaggtcacatggtgataaaaatgaggataaactgaaattgtctgtgagccagattag
tttattttatgccagtcctaggaaaaagacacatcatggtaggatacatcctttttttttttaattat
actttaagttttagggtacatgtgcacagtgtgcaagttagttacatatgtatacctgtgccatgttg
gagtgctgcacccattaactcttcatttaacattaggtatatctcctaatgctgtccctcccccctcc
ccccaccccacaacagttcccagggtgtgatgttccccttcctgtgtccatgtgttctcattgttcca
ttcccacctaagagtgagaacatgcgctgtttggttttttgtccttgcgatagtttactgagaatgat
gtattccagtttcatccatgtccctacaaaggacatgaactcatcattttttctggctgcatagtatt
ccatggtgtatatgtgccacattttcttaatccagtctatcattgttggacatttgggttggttccaa
gtctttgctattgtgaatagagccgcaataaacatatgtgtgcacgtgtctttatagcagcatgattt
atagtcctttgggtatatacccagtaatgggatggctgggtcaaatggtatttctagttctaggcccc
tgaggaatcgccacactgccttccacaatgaacagacacttctcaaaagaagacatttatgcagccaa
aaaacacatgaaaaaatgctcaccatcactggccatcagagacatgcaaatcaaaaccacaatgagat
accatctcacaccagttagaatggcaatcattaaaaagtcaggaaacaacaggtgctggagaggatgg
ggagaaataggaacacttttacactgttggtgggattgtaaactagtacattcttaacatcaatttat
tcctaaaagcaatgttcatagggcacactgtaggccatagatttgcctcacaaatttaaaggcctaag
ccctcaacatgcacagcagtatactcagagactatttgtaaagatgacgattctggaactttttaatg
accccaatcattagcaatgattaaaattaatattcaacattctatatttaccaaggcaataaagtaga
ctaatctattttaaaagggttttaaaatgaagagatgaaacaaaccaaatgattttgatttaaacttc
atgaaaacataagttgcattaatcaggtgattttgttttatgagcattctgattgaagtgatcatatt
tagccccgggagaataagagaaggtaaagtatgggtatggcactgaatttactgagatgattatattg
tttgagttaaagaacttgtattaagaaacaagtatgtgccaaacattgtgctaggagcaagcaatgct
aaaattacatgggtagaaagagagaatgaaatatctagaatgagttagaaacatcagtgttttccaat
gtggagccctgacttcacatgaaaattctcattttcaaacaaggtagtttatgaaaactggactatta
gcaagacagggtgggcatgccatcagtatagtacctggtgtaaaactagaaattttaatcatttgtgc
tttcattttataatcagtaaaatccaaggtaggacaaacttttactttttctgtataatggactgata
tttgaattatacccaactttaattttttgccagaaattatgctttattgtttctctaaaatggtacta
tagatctttatttatttctatatatttatatgatttttacatatatgtgcatttacatgtatatacat
ccataaactatatacatatatacacataaattacaaatatgtgtacctacgtacatatatatgcatat
atcacgcaaatacaggcacattttcaatacccctttttgatttttttccttgaagagcatagcatctg
aatttattatggatttatttttaatttatggtcatgttctttgagtgcttttggtgtttatctggttg
ccccaaactcgctagcattgtaaagaagatgtgcaaagcctgaatctagactgactttcatattgact
ttattagtcaaaaaaagtagatgaaaatgtaacagtccgtgttaaaaatgggaataagacagatgttc
aagccctagcttcagcagtttttagctgagatttactggaagaaaacattttctgaactgtaaaacat
gcaaaatgcctacgtgacagacttcattaacattattaaatgctatgatatagtaaaagaatttgtaa
actgtcaagtgctttgtcaacattaggaatttagttattataggtatttccatatacatgttgtattt
agaattccctttaattttatacttagggttgatttgtattttaactaagtcactttatatatctggtc
ccattatacaagtatacttttccttaggataagaaagtgatctttatatatgtttatcaacccaaatg
cccatcagtgatggactggataaagaaaaggtggcacatacacaccatggaatactatgaatccataa
aaaagaacgagttcatgtcctttgaagggacatggataaagctggaagccatcatcctcagcaaacta
acacaggaatggaaaaacagacaccgcattttctcactcataattgggagttgagcaatgagaacaca
tggacaccgggaggggaacatcacacaccgaggcctgtcgcgaggtggggggcaaggggagggagagc
attaggacaaatacctaatgcatgcggggcttaaaacctaaatgacgggttcataggtgcagcaaacc
actatggcacatgtgtacctatgtaacaaatctgcacgttctgcacatgtttcccagaacttaaaatt
taaaaaactttaaaaaaagaactgtagatactgatccaaaaaaaatgttcattaatgggggttaaatg
attatttctaagtagactactcttgaacccttgaatctttaagaattttctttgctattgaagccatt
caaactctattttattaaagctgtcgttattctagtagattttaaacagtaatacctgaatacattag
aaatatccaaatctgcattacatatggcatctgcagagcagaggagtttggtcatctggactcatgct
aaagtctccgaaaaatccgcttgtcttaatgatggttgactcgctaatgctatgcgtatatagtctta
ttttaagtgattgaatgatgtggctaataacccctctgttagatgcactcagaacctcacctacctgg
gtcctcagctctccagtgaaatctctactttaagtttattttctaacatggtaagagccttcagttta
tgttatgctcaggcccgtcactgtgaataaaatattagaaatggactttttttttttgtattttttta
atggatcccttggaactttaaaaaaattatttatttgagctttctactgttatcacagtgtctcctaa
gcatggcctcccgttttttgttggtaatataattcttacgttattcaaattagtaaccattatttttc
tcatggctagaattctggaaactattaggaaatcactgagcataattgaatggctgtttatttgaaga
gctatgtcaaggcagcatagagttgtattttcttgcaggggctctggagtcaaagagcctgggttcaa
accttggctccaccactttctatctgtggggcattgggcgtgttacatttgtgaaacttttgtttctc
catttgtaaagtgaggtttgggggatgattaaaccagataactcatgtgaaatatttaatggaaatgt
atttggtaggggatttattatttttaaatttggattgcacatgacacatgtcagggatcatgctatgc
attttggatagaaagatggctaagatatcatgcctgactcttaaaaacttacctaatggtaaatgacg
agttaatgggtgcagcacaccaacatggcacatgtatacgtgtgtaactaacctgcatgttgtgcaca
tgaaccctaaaacttaaagtataataaaaaaaaaaacttataatcaactgtagtagaaagagatctga
atggcttgccatttagctaggcacatggtatatgtgcttaattcatactagcagccactacagttgtc
atgattaataatgagcttccaactgcacagaatgcttttaatccatagaaaatcaaatcagaaacaag
tttttgtaaaattaatgtgaaaggagcaacaattaaaatgcaagattgacatttattttctaaattgg
ttctattttctttcacatttacaaaatttataagaaaattctttatttctatgtgatataaagaacta
gaatgtactttgatgtgaattattgttgccagtgctgttcaacttttatccataatttactaagcacc
tacatttagacaaaggcattatccatccctttggggaggatttcagatgattcatacacagacctggt
ctcgaggaatttaagattttctttggggagggaaataaggactttaaccaactcaagagtacttagag
aattttctgaaaataattttatcaatgaaaacttgttatattaaaagaaactgtcattctgacttcca
caaatctaggcttgaaactatggataacgagatattttctattactctcactcacgtcattttcacaa
agtgaaaaggtacattttaactagtgaaagaatagaggaaatggaagtagctcgaggcagtggacgat
gattcaaaaagacagggccctattatttgatcaagttatgcaacgactctgggcctgtttcttcacct
ctggaaggaggaataatctccaagccctttcagactcttttggtaattcacctccagcacatcttcta
aatgccagcattaactgtcctctgatttgtctcatgtttttctagccccatgctctcctgttcgccat
ttaccctcatgcaaggtacaaattacacccatcatcacaagacacttgctcaagtcccattgccccct
tgaagacctgccacacctactctctcaaaaaccatcatttcctgaaagtcctatacagctcatttggt
atttacagtgtactgccacaagccactaagcatcgttttgtgaatacatgacttacagacttagcttg
agtaaagatacttgaaaatgaacaccatttcttggctatcttcctattttgatgtacccttcaggcct
atgaattttagtataatagataaccaataattatttcttggttctttcctgcacatctgaataaccct
atgcaaagtgatagaatgtttttctataaggaggtcctacactggagattgtgtatttcttaatgctg
ttgaaggaagagatgtgtatctaaaataaatagactctaacaaacattaatttatatttctattatct
gttttgtgtattgagatatctcacaaaaataactaaacattttggcattattgatattacatatttgc
catgaatatttgtaaacgaagaaaaatatatatacatcagtaattatcttggcaaactcttcaattat
gcaatattgttacatagattacatatctaagtgaacactggagttttaacaatattgtgtgttcataa
atgttttatttattattgccactaattcttattgccatttcaagaactatgtataagttgttctaaaa
actattaaagtataggtgaccatggtcactactgcctactttggtaaaggccaaatatgtgaagactt
tttaatgtgttaacaaacgttgaaggttttttaacctgttaacaatcagtaggactcttgaaattatt
tcctaagagagtaaattttacaacttgcaaagcatgattaacctcttgtaattataaaccatctcttg
tagttatgtagcattttgttaatgagcaaagaaccattgtggttcctttttacatttcttaaaataat
tctccgtaacctcattgatatctccagtaaatttagataagcttttttttttaaaggagggttaaaat
gacattttaaactaatttttcttgttagttatacagagttgaactatctgagggttttattgacagtc
ataaaaaatttgttattttctgtgaaatatagagaatttaattcattatcatattattaattctgtgg
gccattgtcttaattctagaggcacaagctgttttcatcccactgaaatagaggaatcaaagtatgtt
ccttgctcaaagcacaaaagtgacatactacatagtatgcttcttgagtagtcgtaaatctcatgtgt
taaattacatcccaaagatttcagtatgttttatgactttaataatttatggtaatttctaatctggc
ctttgttgacctgtcttgctttttaaatttttagtttttcgacaaaataattaacatattttaataat
cttccaaaggtgtttaaaatggcattgtatagagatagctgaaggcttttgagcttctgtgttgtaaa
cactttcttaataaaacatgaattgctaccagatgatccagcaatcccactactgggcatttatccaa
agaaaaggaaatcagtatctttgaagagatagctttgttcccatgtttactgcagcacttttcatact
agccatgatatggaatcaacctaaacgtccatcagtggatgaattgaaaagaaaatgtggtatgaaac
agaaattgctgctttaatttatattaaacacactcatattcttctcagctgttaagtattgagttata
gatttaaagaattctattgtgaagactaaagtgactattaaagtaagaaattattttttccattatat
ttaacttatttcatactttaatgttagcgccaatgagcaagactattgaatacaaaaactaattaagt
agtggtgatagtacagtatataagggagaacattcttttagaaaggaacaataacagggagcaataga
aacaatgaatgagtgtaaggtcacttagtgttaaaacagctaaaatatagtacaaataagttgcgttt
taatagtgattttatataattacaccttgatgttttatttgttacaagaattgtccaggaagatttct
ctaaagaccaaaggcactcttcccctaaataactccaaagccagtcctgtgtttctataaaaaaaaaa
aaaaaaaaaaaaaaaaaaaaaaagtgaaaataacgtgatgaacatttttgaggaagtataaaaccaaa
atactccactgcatagctgtttctgcaggtattgtattgatatattacattattcagctttggagtct
ccacatccaatgttacatcatcactctaaattaaacatgtatagataaatgaaataaatgagatagca
tatgaaaatctcatagcccagcccctgcactatttaaaatagaaataccaaagaattgtattcctcat
ctgaaagctatttagtggtggtgtttcaaataaaaattccatctactgctgttgcttccattgtatct
ttttctctgcggtactgaaagagaaagagacccagaaggggccttgtctgaagtgtccctcttttaag
ctgttgctgctttaagcacagggtggacaaatgtaataggagtttcataaaggtggaataaaccagcg
gattacggtgtgggtgaatactttcagatgttaaccaggagctctgcttgcatgctgggagttgccca
tgcctcttctagattgaggcacattatcatgcacaacctaactccaagaaatcttttaaaccactgga
aattgaacccagaacatgtctctaagccagccttttcatcctgacaccgaatcatagcatgagccagt
ctgtcagggatgctgctgctctctaggcaaattttaaatgttgaaataatgaatcatgttttcttgaa
aaccatgtacaccaaagaaaagttagtcattttatagatgatgaatattaacattttcttagacaatc
tgataaattatcagatctcacttttggctctttttaagacagttatgcctcagaaatattaataaacc
cccaagcccttatactgatcagtatgttcactactagctatgagaaattcttgaagttcttgtaatta
ttgtattatttccttactttcattttattagtatgtgaataatatttttaaaaattctagtgtatgtc
ttgtatatattttaacaacatgacttttaattaatgtcttgataacatttcttctagtgtatgttttc
agtaacatgattattaactgtaactttaaaaacctgtggattagatgggaccattttaaaatgtttta
aacctggaaaatctgatggctttaggtttagttcaagctatagatcacctgtggagaatggaactgcc
aaaaaaaaaaatagctgtagcagccctttgagtattctaaaatagggatgttatccagagcattggtt
tctaaagcttccattatttattgatgttgagctttcaggatttagctacaatatttactcaacatcta
agccatgcttttttatcagtcatgttttatatcttttataatcaaactgcttatcactgaaaaaaata
tataagtttctatgtatctggaagaattctctggtgtttcttagatatggattttgatgtgtggaata
agaattcaattcaaggataacagagatgttgtcctgaaaaaaatcgaagaaaatcagcttttctttaa
cattctgtcaaagctcctgactattagtttatcagcactgttttgccaaaggtgtcttctcttctctt
ctttgaaaaaaatcatctgctgctgctacgccgcaagtgtgttcccgctgtgcctgagaagatgtgtg
gcataaaaaaatgggcatggcctgagttaaaagtgctacatttaagccagagctggcttatttattag
ttgtctaatcataggaaaatgacagagcatgcttttctcttgcaatatccgttgctgaaaattaaaca
catgagcagagctttcagagaggttgactggcctctcagacagcacctcataggatggcctgtgttga
agcatctcctttaaccagggtctgtccctcagcattgggttggctcacctagattggattgtcccagc
agaaaaaaaaaacccaaaattcagaatcatatccaaaccggaatactctttcattcacattacttgta
ctaccttttcagaaactggatacctgagtgtgtgagggtaacttagaaacttatctcatggttagaag
ttttagaattagagagcgatgatcatgaaacggacttcatgatcagaagcaatggagcaaggaatgag
atgtctttgaggagtatttccctgaggctgtggataacgctgacgaataatccccaccttaaaagtgg
gttgaccactctagtagctgtaaggtgggagggttctttcttcagagataaatctgtgctcttcactt
gcccatttcccaggttttcatgtaggtagaagaaacacctgtaatctgaagacactcttccttcagct
ttgttagtgacagggatttaaatatgtctttcacacattttccttagatagttaaatttcacttttcc
tgtttgtttttctctgaaggtattctaactcccctcctaatggacttctagagctttctaattctatg
caatttctgttgatttgttctggtaaactttgaaggtaatctctgattcaacttcttggagattctat
catgtcatctctgtttattaactttatgttactcatggtttcttgatgaggactcattaaacataatg
taagtagaaaattattaactacataatatttactacgggttgttatttctgatagtagctagctgtaa
gattccaattgttcttcaaatctttgtctcagtgatctctgtgtagttcttgactacttcaaataact
tcctagaaggatagggatttaataatctcttaataggaacacttaacacactgctggtgggaacgtaa
attagttcggtcgttgaaagcagtgtggtgatttctcaaataacttacaaaagaattaccatttgacc
cagcaatcccattattgggcatatacccagaggaatagaaatcattctaccataaagacatatgcacg
ttgtgtatgttcattgcaacactactcacaatagcaaagacatggattcaacttaaatgcctatcaat
gaacagactgaataaagaaaatgtgctacatatacaccatggaatactatgtggccatgaaaaagaat
gagatcatgtcctttgcagcgacatggatggagccagtggccattatccttagcaaacttatatggaa
acagaaaaccaaatactgcgtgttctcacttataaatggaagctaaatgatgagaacatatggacaca
aagaggggaataacacacactggggcctactggagggtggaacacaagtggagggagaagatcaggaa
aaataattattgggtactatgtttagtacctgcgtgagaaaataatctttacaccaaacccccgcaaa
atgcagttcacctgtatagcaaacctgcacgtgtacccctgaacctaatttaaaagttataaaataaa
cgtatcttattttcagtacaatacaccacagagtagaagggttaaaagagattgcttctgaggaggtg
agatgggggtaaggacagcacaagagcattttggggggtgatgaagctgttctgtgtcttgcctgcga
tgatggctacacgactaagcccttgtcagaactcacagaactttacttcaaaaggagcggattttact
acacatcaattccaataacaaatactttgtctttaagcaaagggatacctaaatatagcgtattgaat
ggatctccagaaaaacacatttttcagttcatgtttcagcctaggcctcatctcatccaggaaacctt
gtcttgcttgcctttacatacatgtggcaatcagtagtttcttttagggctcggactgaacactcaat
gaacttcaatcttagcgcttgtcgtagcagattgacatggtttatttatatgtgtcattctctgtagt
aaaaggaaaggatcaaggccattcacttttgtagtgattgtgcatggcagtatttggcacatagtaga
ttattaattatggaacttctgttttcacacacacacacacacacacacacacacacacttcagagcta
ttttcatttaaatatttgctttagtctccaaagcccctctgcctcaacaccaacccttctatctcatt
attcatcagcttttctcctattacgaaactacttaggaaagcccacttatttagcttatgatggcaaa
aataaatatttgtacttttttttttttttttagtcatcgcttcatagaacagcctctgtcctctgctt
atgccatgtctgaatatatgctggaggtaaaaagagttcctggttgagagcttcaatttgagaaacta
tctgagattactttccaggttccaccgtggaacctgtctgaccttgaacaaatgacctcgaacaagtg
gctgaaatctcttctatttcgtcaactgtaaaatgggggaaaaccatgtctatctcatggggttcatg
tgaaggttaagaaattgcttattcagtgtttagcacagtgcctgatatgcataaagctcctaggaata
ttagctgttattgtatttccttaaagaagcccatagctctatatgccctttcattatatgttttagta
gcccaatttaacatatggataaaatatttttaagttaaatgatttgctaatggattgttgaacgagtg
gcagacacccatattatagacgaaggtcaagtccataacatacagtacatttccccactttcatttcc
cattaccaaaattcattattctcctgagaaactcattatagaattcatgtcagattcatctgtgtgtt
cccagcagtgccttatatccagaaataacactgagtcattgtctagatgtagcagaggtggaatcctc
caaagagaagcctcagagtggccaggtttgccaagtatagggatgccttgattactggccttactctt
tatgctcgtgaattcctaagttttattcctcctgtagtcatagattggcttttaagctacaagctgaa
gagagagaaaacctcttccacctcgttggaatatgtctcttcaatccatttgagccaatttaggacat
gagactgctcttagtctagaaccagtcatcaggagaattccaggtctgattgactcggactagcgggt
caatatcagggcaaaaattccaacgcacaacacgatgtatcagtaaggagaacctcaaaattatttct
taacgtccagatcatgttcctatttttatatatctattttctcacataagtcattaaaatgatgtacc
tgtgcgggtcctttaatgatactcaaagatcttgaattataggctaataactaacttaataagctgca
gaaattaacatttctgctacgtttatgtagcattttcccacatgtacttcagaggcttgagaaaagac
cctgaaataatgactgaataacagctttactcacttaatttcaaatttgttaattcttctgggaaata
ccgtcaacatccattttattatttttctcaattacatgtacgtttctacatcagtggataagttaagg
agaagaattccctcatgataattttttcatgctcgaaaattttgaatcaattttttattttacattat
actctttcctagtcattagaaagggagtggtggttaagataggcaagaatgctttataaggatactac
tctcgtttcaattcttaacatcaaaaaccttaacagtgtgtagactataaaataaaatatctagggat
cagagcattgtgctgaactttgcaggttttttagtcaataatatatatgacgtgttcacagaattctt
tgtcaacaaagtacttttggagctccaggccatttaagttggtttttgtactttttctttttcttcgg
aagactttttttgttctatttacctggaagtgtttcttttttggtactgtgaattaaaatgagaccaa
tctactaggcaggaaaaaaccttaattagattgttgacacagacaaataagaatgtcaattagcatct
actgtcacatgcctctccagactgcttctaggatgagtggcctcaagcagctacatcatctttatact
cctaaagcatcaaggaaacttggagtgacaattcatatcatgaacacatccacagtgatgatgattgt
gcttcttcccccccacccaacaacaaaggatgaatgccaattaatgtattcagttttttgcgtcaaag
gctggatcacttgtgcaatgagggtaatcatcctgaccagacaggccatacaatccatattgtgtgaa
ttaaagataatatgcgtgaaacaccttactctggatgtggttcatagcagtagcaaaaagatgaaaac
tatggtatgctaacattttagagatctgtactctattttaaataattttataaaagtgcatatacaat
aaaaagtgcacgtatcacaagtatatgcctcaaaatctaaagccagtcatgtaatcagcatccacttc
aagaaagaaaacaaaacagtacccctggttcctctttgcaatcattagtctcccaagagtaatcaccg
atctgatctgtgacagcatagattggttttgccctactatatttttgctgaattatacaatatatgct
ctttaatgtctggcttcttagtgcattgtatttgtgtatcagctattctcttgtgtgtagttattaaa
caatcattttatgggctgcataatattccatagggtaaatataacagttttattgataacttagctat
tacaaatagtgctgttgcagacatatattctattacatgtcttttggtataagaatttacacatttca
catgggtgtatacccagaactgagattgctaaatattggggcacattgtatacattttgatttagtag
ataagatattgccagatatcgtaaatgcacagtttgataaatatagagatttatactttttctagaga
aaagccatcaatatcagtgtatgtgtatatatatacgcgtgtgtatatatacgtatatatatacgcgt
gtgtatatatacgtatatatacacacatatatatacgtatatatgtgtatatatatacgtatatatat
acacatatatacatatatgtgtgtgtgtatatatatatatgaaacaactcagaagcagaaagataccc
catgttctcacttataagtgaaagacaaataatgtataaacatgtacacatggacatagagtgtgtag
tgataagcattggagactgaagtgtgggggtgtgcaagggaatcagtgataaattaatggctacaatg
tacataatttgggtgatggatacactaaaaatccaaagttcaccactatccaacatactcacataata
aaattgcacttgtaccccttacattcatacaaataaaaaattatttaaataaaaataaatatgtgtat
atgtatgcatacatacatatgcatatacatatgtgtttgtgtgtgtgtatataacttacacttaaaat
aagcatggatgctgcaatgaatgctcaatttacaagggttgtccatccaaacttgtggcaagtatctc
acctctcaagttgttttcttttttcttcatatatttcttgcttttgtctaggaaggaataatttggct
tgcctttcaagagtgtacagtcagcatgataacccaaacacttaagacacgtgctaacccatgtggat
cccttgagagaaggaaaacagtggtccttttactgggcagatagagcccggggccaggtttcgtggct
tgaagatttcagcttctctgcgcctctcagctcagtgcctctggaagcaatttacaacttgtgaggcc
atactcaaaggccctgttattaattccccgccttccgagaccccatttcagaggatctcaattgctct
cagagtgaatttactgtttcctgaattccgtaatcccaatagcaggtctgttgtcctcattagatagc
ttaagttagagtcggcagtgtaattggcaactgagctactaagtatccaatgcttatgtggaaaatat
gttccctattgcaaacaactgatattcatattcaatttggcaccatcatctatctataaagcagatac
tacttgtgtttattaagttttatcccaaataattattttagtaataatgcttgaaaataggccttggt
catttgcatgtctgtatatggcatatcctgagtctttgtatgtattagaaagatcactcgttttgact
tgatggtttaataaaagatgtccctcactttgggcagagacatttgaaaaaggcactccaaccaggga
cctaagaggtgaatgagatgcagctctgaatcaggtcacacggcctcaggaaggaaacatcttggttt
tcacatccctcacttctcgatgtcatgtgcaatacacaaatgacccctcaacacacacacaggcacat
acacaaacacacactcactcactcactgtattgtctctttccttgactaagtccttcttactaactca
agctctaaagcttttttacttacctaaggtgagtgtgtgaggatttgaggtttcaatattaaaattca
gaaacatttaaagttcattttaaatattagtaaaaaaaaatcttgacaaaatacaattatagacaaaa
agaaaattcagaatatttggaatttaaggttgaggttacagccctatttatgaaatattagaagaaaa
atgctggagagaataaagcaggtttatgagtctgatagaaagcataaccagatgattatgcatatatt
tgcatatgcaaagctttctaggcaatctgaacatttaaacctacaaatgtggctgcgatgaacagcca
cagaagagcaggctagaacagaagaggaggctagaacagaagagcaggcagaagttgtaaatgaaatg
ttaattttcaatggttgatctcccaagtactggaacagatttgtgctgttttcaaggttttggttcaa
agaatccagtagtgtattgaattgttttgtggcacttccctgttattttgctttgtaagctacctcaa
tccatgaagtggctatgagccccttatacaacactgttgatttttttttccttatctacgcaaaagat
ttttgattcagggccaggcatggtggctcacgcctgtaatcccagcactttgggaggccgaggcaggc
ggatcatgaggtcaggagatagagaccatcctggctaacacggtgaaaacccacctctactacaaata
caaaaaatcagccgggcgtagtggcatgtgccggtagtcccagctactcgggaggctgaggcaggaga
atcacttgaacccggtagccgagatcctgccactccactccagcctgggcgacagagccagactccat
ctcaaaaaaagaaaaaaaaaaaagattttttattcaggtggctatcagactcattaaatagaagcctt
aggttaagttcacgggttgctagttggaagcctccatggactatgttcataaaataatagaaaggagt
tatgcaggacttcttgaaatgttatttaaaaagtcagaataggctttctattacttgtctgaggtcaa
atacatgtagtgctttctgaccatttcatccagggtgttagctaggacaataagaggtgcttaaaaat
tattagattgagtaaatgagaaagcccttagaaacataggaacagaatgacccttgctttggatctaa
tattgactcccacgcctaaatccctttggagaactcctttattttctcttccatcaagagcaggtata
aattaaaaacaccattaaaggggccatctagctcagctgaagctttcatcacacatgtaggggaggta
tggttgggagggatctttttatcctttaggtcttcaatttacataggacttttgaataatcaaatagc
cccaaagagctgatcttaggactagttgtaattgagactatttctccatggggtagaaaaatctagtt
gtaggaaaactgagaagtagatgtatgttaacctcaaaggctgttttttacaaaggatgttaaagcat
catctttgctcagaaagggagcaataaaacaaatgagtggaaataacaaaaggaaataatggccaggt
gcagtgcctcacactagtaatcccaacactggggggctgtggtgtaaggatcgcttgaggctagcagt
tcaagaccagcctgagtaaaataggcctcatctctacaaaatagatagatagatagatagatagatag
atagatagatagatagatagccgggcgaggtagtgtgcccctgtagccccagctactcaggaggctga
gatgggagaatcgtttgagcccatgaggtcaagtctatggtgagctgtgctccctcctgccactgcac
tccagcctgggtgacagagtgagatcctgtctcgaaaacaaaaggcatactttttagatgtaatggaa
tagagtacttccaaacctggctgcctgctggagttgtattggaagaggttgcacgacttcagtggaga
tggcctagatgcctgctcagcagtcatctagttaaagcaactaagaacatgtaatatgaaactgcaaa
aagagatcgtgtacgtaaaatcactctgggctcctcagatagagtaataaacacaactcctgacagcc
aaataaaaagagaaataatacagcccttgacttccttggttgctttgacatactaagtaggtgttaca
ggttgggttctctgggaaacagactctaaaacatttttatttttactttatttgttgttattattatt
attattattattttagacagaattttgctctcgttgtccatgttggagtgtaatggcacaatctcgtc
tcactgtaatttccgccttatgggttcaagtgattcttctgcctcaaactcccaagtatctgggatta
caggcaagtactaccacgcctggctaattttgtatttttagtagagacggggtttcatcatgttggtc
aggctggtctcaaacacccgacctcaggtgatccacccacttctgcctcccaaagtgctgggattaca
ggcgtgagccactacgcccggccagactctaaaataaagtttaatatgcagaatacttatcagggaat
gcccactggaccaatacatattcaagagagggcttagaagcaggattggacagaaagagaagttgagc
tgtaatgcaggcccaataacagccttagtgttaagcaggctgagagattcagcagttaatgagacagt
caacccaaacagttttataggcatcaaaagtatgatcagcatggtgtcagtttcctgtgtcacttgtc
ccacagtatgataccaaaattaaagagaccagatgacatgcaacacaagcagtgtgcactctgttgtt
gagaagccaatttcgtcatgcaattaagcagttttatactctgcagctgtactttaaggggagctgag
atggaacatcatatgtctcaccataaccagaaaggcagatgagaaatgttctatcgccacctcccaca
aggtaagggacttccctaaagatacagaggtgggtggaatattgccttggtagacttcctctcaagac
tgcctatcttcccatgttggaaggatcacagagcatttgtcaagacgtgggtcaatctgcagttgaac
tttgtgtatgtggcctatgtggatacttataatatcattgggcacctccatagagctgtttcccaatt
gaccaaacatatgggaagcttcagagcttcgaatgacccttcagagtagtcctgagaacagtgagcct
tactactcctgcattaatcagtcattggatgatagccttctcagaaataagtcatgaccttgtgcaag
ggggctcttcatggctgggaccacccctaaaactgagagctgaaggctgtctgccaccagcccttcca
cctgctgggacaagttctttattgaagggaaatctgagtagttcatcagcgtccatcacagtagtcaa
gccgttcattcttccttcttatgacaacattgtgcttattgttatgtaatccctttccagaacatttt
aggttaagttttaaaaataatgcatataaatagacaattcaaatactggggaaaaaaagcttgcactt
atattgttatagaaatgtgcacacttaaagagctgatttcttctgggtatttacataactttatttaa
aaatccatccatttttaattagctgtttttaatatgcagttagctaagatattataagccatatatta
ggctaatggacatttaacagcttagttaagttcttttaatggaaatgctgacaaacctttgtctgtaa
ttatagcaacactgtgattacagaaggaggtgcctctccttgttgtttgcagccctaaaattccatgt
ggctataagtaacaaagtccattattagataaacacaagtcatacttggcattacttgcattactcgt
ctccttgctttatttgaatcattttttaaagttgtaaaatgtttttcaaaactcagaatagtggccag
ttaataatatgattcctcttatattatgagattttaaaaaatagttcaccagtttctggtggcctcta
tacccattggcaagtcctagccattgtgaattaagtaaacaattctttatggaaattttttaatcctt
aaaccctataagtttttattcatcatgtcaggtcacttgtcaaagggtttaacattcagaattcaaca
aaagtttatcaaacacctattacaggacgtgcaattttgggcgcactgggatttcagcaattaacaat
caagatatgatttgtatcgacatggatattacattctctcacaggagacagaaaacaaaataactaga
aaatatacataaagagactttaaaatggggtaaaattacagattgtgacaggatgaccactttggttc
agaatatctaggacatttttttctttttttttcccctccctccctctttcttttttttctttttcttt
tggtgcaatctcagctcactgcaacctctgcctcccatgttcaagcttttcgtgtgcctccgcctccc
aaataactgggactagaggcatgcaccaccaggcccagctgatttttgtatttttagtagagatgggg
tttgaccatgttgcccaggctggtctcaaacttctgacctcaagcgatccacccgcctcagcctccca
aagtgctgggatttacaggcgtgacccaccaggcccaagcaaggacatttttttctgagccatgttat
ttaaacagagatctgaatgacaagaaggggccagctctgtgatgtaggggaagaaaaatatgttcctt
ctacccttctaggctgcccagctggagtcctacaaagttagagtgacaaaagacagattaacaagagg
aaaagcctagaagtttattaaaatattcagtgcacatacacctggtagaaactcagtgatgagtaact
caaaggggtggttagaatgttgggtttatatagcatctgaacaaagaacagtaaacttgtagagaaat
gacaaaacaaagaaaaaaggggtttaggtatttagggttgccaaactgtaggaaggtaaatatatggg
agaaacatggagtatagtttgtttatgccaagtctatcttgagatcaacttttcgtattcttcatggc
cataacaatttcccaggagagagggcttatagcagttatcatttctcagaagtttctgcttttattta
gacaagggaagcactgggaaggcttctttttgcttatattgattcttacttgcctctaactaaaagta
atctttatgtcaaagtgccatattttggagtggtatatattgatctcctataataacaatcaaaagga
acagtattctaggcaggagtaccactaatgcatagtgtttggtgtaaagacaagttaacatattcatg
gggcaacaacaacaataagccaatatggctaagacattgaggatgagtgagttggagaagtaggcaat
ggccagctcatataaagacttgttcgtttttataaattgtttagattttattgtaattatggtggcaa
gtgattggagagtattagcttcactttgactggcttatcgaaaacggaatgtagggggtgaaagtgga
ataaaaagaccagtcattaattgagtagtccgtgtgagagatgatagtggcttggacaaggacgattg
tactggagagattgaagcgactgatttcagatttgtagtcaacaaggcttaattggtaggagaaaaaa
ataaatcagtgttaactctttaatgtttaacttgaataattatgatgagggtattaccatttattgag
atgtagaatattataaagtaagagcagatttgttcaaaaagtatcaagaatctttatttggacatgct
agtttggggatgcttattagagaccctaggaaactgaatataaatgtggattttagagaagagcttag
ggctggcagatgcacattaaggatctgtctagagccatggcgctagagacctccaggagaacataaat
agtctcaagatcaagccctgagacactcagatgtttagaagtggaacagaagagggacatccaatata
gaataccaagaattaggaggggaatcaagagagtgtggcaatatgaaagatacaaaaagagtgttgaa
gggagggagtaattaataaccagcatgttatgaggggctcagtataatgaaaagataagtgactattg
gatttcgcaacatataattttttggtgatctggacaagagcaatttgaacagaatgatggatatggaa
ggtccagaggagtaggctgagtaaataatataaggtgggaaaatagatacaaagattatagacaactt
tttcaagaagttttactgtgaaggggcacagcaagctgagacagtgaggataaataatagactcaagg
atggtaactttagaataagaaatttcaatctgatgggatttaagtgttagcaaggaagctttaagaag
ttattttccccattagaatgatctgaaaaatgttttagaacattcctcttatattctattttatcaca
tttatataactttcagagaattgaaagaggtattaagttattatgaaattttctgagattaataagat
aacaattataggatgttttcttttagttgaaatacacctactcagcctaatttttataacttcttact
gaagtataatatacttcagtagaaaagcatgcctaatataaaggtgcagctagatgaatttgcacaaa
ctgaacacatccctttaaccagcacttagattaaaaacagaaccttgatgatacctcagaggccccct
tctgccccttttcagtctctccgtgctacccccatggataagcattatcgtgatttctaataccatag
attaattttgccagtttttgaattttatgcaaatggatctatttcacctaattgtaaatatataacat
tgtcatagcaaggcactcattgccttacactgaaaattacattgactctttgccacaagcttagactt
gctttctcattttattatcatcaagcctatagctttcacactataccttgttcctgctcttccctact
ctatttcttggtagatattctatatcagtcttagagtgcagtttgcagaacccctccatcagaatctc
ctagggagcttgttaataatgcagattcctaggcccctcccatggtttatgaatctgagagtgaggca
gacaagactataccctctcatgcctctataatgtaataatgtcttcctagaatgttctttgctgcatc
tcttattaaagaaatcttatgggccgggcagggtggctcacgcctgtaatcccagcactttgggagcc
tgaggcgggcggatcacatggtcaagagatcgagaccatcctggctaacacggtgaaaccccatctct
actaaaaatataaaaaattagccgggcgtgctggcaggcgcctgtagtcccagctactcgggaggctg
aggcaggaaaatggtgtgaacccgggaggtggagcttgcagtgagctgagatcacgacactccactcc
agcctgggtgacagagcgagactctgtctcaaaaaaaaaaaaaagaaagaaagaaaaaaagaagtctt
atgtttcctttatggccagagcacaacattgtcatgaagtcatctaaaatttcccactagaggtaaca
tctccttcccctgtctagctcttttaaagcattacctccatttgccttgtatcatagctgcttgtaca
cctgtctgtctttccgctgaggttataatcctctggagggtcatgactttgcattcctttgtgtctcc
cattagcagccagcacagtgccttgcatactgttagttctaaataacttctctctctctctctctctc
tttttttttttttttttttttttttttttttttttgagacagagtctcgttctgtcacccaggctgga
gtgcagtgcaatggcatggtcacagctcactgcaacctccccatcgtgggctcaaatgattctcctgc
ctctgtcttccagtagctgggattataagtgtctgccaccacgcctggctaatttttgtatctttagt
ggagacggggtttcaccatgttgcccaggctggtctcgaactcctggtctcaagcagtctgccctact
cggcctcccaaagtgctgagattacaggcgtcagctgctgcgcgcatccctaaataaacttttttttt
tttggcatgaaatctgtaacactggaaagatgttattgccttagaataattaagagattaaatgtaga
atctcaaaaacattcatttttttccatgaaaactttaccaggcctcaagggataggaaaattatgggt
acagaattgagaatctgtaggaacttgcaagataaacaacggtttcacaagaaagaccttgttggaga
gttaaattttcagacagttgtaataacttcacattaaagttttgtcaaaaaataagtatctgcatgtt
ttgtttgccttccaatgccctcattttatttgattttttcccataagtaactatagtgaaagcacgaa
aatgtgtttctgtgtttgtgtgcctgtatgttaattgtgactgtttctattgcattgttattgcagaa
cctaggcacgcactctgtaggcttgggtgctttctccaactgaaaaaaatcctacatatggataaatt
atttttacagccagtctttaattttacaagtggtccccctccttctgtttttaggatggcagagagaa
tacatatttacttaccattatcacttactcatgctttgagcttgaaggaaatgagacagaaaaatgaa
gtaacattaacttctctctggaactatgtttctcatattagagctttatctgaggagttcacttcctc
tctcttcaatgctttgttcctctccagtcgattcaaatgtcctcttaaagcagaagttccgaacctct
ttctgtgacttcaggagagcatgagaatgtaaatataagttttaggactaaattttcaaagacttttt
ccactcagctctcttttcctcttcggtttgttgttgtcgttgttgttgttgtcgttgttgttgttgct
gctgctgctgctgtttttccccttccacttccgtaactgagctcttagggtccatctggaatctgatt
gcaattaaaaaaaaaaaagtttatttttacctccttgtacgtgctttctcctaaagcaggagtcagaa
gccttttttctttgaagggctagttagtaaatattttaggcttgtcgtctttgtcgcaattactcaac
tacgctgttgtagtatgaaagcagacaatacatacctgaatgagcatggttttgttcctagcaaactt
tacgcacagagaaatttggatatcgtataatttttatgtgttgcaaagttgtattattcttttgattt
ctccccaaccatttaatatgtaaatcccattcttagcttgtgtgccatacgcacacaggcagcaaatg
cgagttgtcacacaggctatagtttctgactttatgtcttaaagtaaacagtaataatcattctcttt
ttccaaacagtccactaatctccctttgtattcagcccttgcatagtaaacgccgtttcttcatcatc
ctgatttttattctgagaaaatactgtatattgttcccatgcactagggttcggggaaatttaaaagg
atgtaggatctccttttcattggtcctaaaattgcactggggaggcaggtcatgtttatgaacagata
aatagtatcataatataatcatgcatttctatggctagcatttagaactatagcttttgatgtcatgt
ggtttttatatggttgattatttttttcttatttataaaatgaaaaagtttgagaatttttcatctcc
ttaatgtattcccttatttgagggaaaagtatttacctactacataggaatttatcttaaaattttct
ttgtctatctatttttatggaatataatcgagcaactattttactaattaatactttaatatcattat
gaaaatgttctcatatttttaaccttataagatcagataattgctatgccaatctatggttgaaatgg
gttcttatacttaacgctatgctctttcttctgagatgtaaaaatatgtttaaatcagaatttatata
ggtgtcaattcaaaatgacagtagttcattattttgattagtataaatgttcacaactaattctattc
tcttatctattaagtcaccaaataaagtatatttgttttaaatatttaacagtttaaattattctttg
aaaacttatgagtctaaagtaagaacaattaacccattcattttgcaagtgggatagttgaattttac
ttgcaatccagggatttttgacagtttgaaatatacatacataccatgtatgtttaggaaaacattta
aaaagagggggttgtaaaataataatagttcttccatgattttttagccataatgtttataatataaa
atatgtatactcttgttattgaatgtagtatgtttctaatttaccagaaggcaagagaataatcctgg
agaatttctcaaggcatcttcgaactctttgatttattgctcacatatagtaatttgccaaatgacgc
cctagtgaactgaaagaattaatgccccgtcctaagtcactttcaccgagggactgaaaacctgcagc
attttgccaattagaggaggaaacaatctaccttgcagagtcaggagtactggataaaggagctaaga
tgaagtagtaagtacgtttttgcaacatacgaatttagcagactggccttgtgtttatttttggccgg
aaccattacacttatttccaaccctctcctttatttgttggttgataatgggctaattttgaatcttt
actgtcaaaagaacattaagagaagcagccctgcctgcatcgcaggctatgtctgtcctttgccgagt
attaaacactaaaaaaaaattaagaaaatactaacaaaatgacaaagcattaagaaaataaaactaga
tgttaaaggaaatgagaaaataggaaaggatgctgtacctggagtgattttttttccccaggctacct
aagatgatcaaaaaagagctaatttctcttaggtttctattaaggaattactagaatatcgggcacac
caggaaactttatcagtggacctgtcctgaaccaaattttcttaatgtatatatgataatttgttacc
acatcccagattattttacaggaattaaaatatatttgaaacactgacagggaaaattgggtaagaca
ttgatagatactacaatctgtacttgaaactgcactcaaggaattcgttagtcaagaaagaacacaat
gactgtgggcccctctgggttttggaacctcttttgtaaagcatttttttttttcccaaatagaagat
attatttttgaaaaggttaaataaaaaatctttgttcactatatagtttcctcctaaggagtaaatta
atttatataaaatattgcaatataaataacaattttaaaatctcaaaagagcagtgttttaaaaataa
tgtagaaacattaagaaatgacttcaaatgataagaatgtcattggagagcaaagggtttttaatatt
acatatcgtggcacgtatatcagcacccaaccgctcaagatacagagttctttacaaaaatcaaacag
aaggaaatgtgccaccttgttcataaactatatttaataataagccaggcagataaagtcactttcac
aaataatgagcaagcccatggtaatataattcatttacaataagatttatctcatggaattcttagac
tgtgctttgaaatttaaataattctgataaatgccaacagaatagagaaatcaattccagagcaatta
ctaacacgttgcattacctttctaacattaatatttctcttcatacatatcattgaagagaaaatgag
gatggaaaataaaaagatcaggtaatatatttgctttctcatctagggttgttatgatcttcaagatg
aagttttattttttactcctagcaaatgatattcttttttattttagtttttattattttatttttct
gtaaattattggggtacaggtggtatttggttacatgagtaagttcttttttttgatatttctgagat
tttttttttattctactttaagttttagggtacatgtgcacaacgtgcaggtttgttacgtatgtata
catgtgccatgttggtgtgctgcacccattaactcgtcatttagcattaggtatatctcctaatgcta
tccctcccccctccccccaccccacaacaggccccggtgtgtgatgttccccttcctgtgtccatgtg
ttctcattgttcaattcccacctatgagcgagaacatgcggtgtttggttttttgtccttgcgatagt
ttgctgagaaaaccacgaggtaccatctcacgccagttagaatggcgatcattaaaaatcaggaaaca
acaggtgctggtgaggatgtggagaaacaggaacacttttacactgttggtgggactgtaaactagtt
caaccattgtggaagtcagtgtggcgattcctcaggcatctagaactagaattaccatttgacccagc
catcccattactgggtatatacccaaaggattataaatcatgctgctgtaaagacacatgcacatgta
tgtttattgcggcactattcacaatagcaaagacttggaaccaacccaaatgtccgacaatgatagac
tggattaagaaaatgtggcacatatacaccatggaatactgtgcagccataaaaaaggatgagttcac
gtcctttgtagggacatggatgaagctggaaaccatcattctcagcaaactattgcaatgagtaagtt
ctttagtggtaatttgtgagatcctggtgcacccatcacacgagtagtatacactgcaccatatatgt
tatcttttgtccctcggcaccccttttctaccccccaagtctccaaagcccattgtatcattcttatg
cctttgcatcctcatagcttagctcccacgtatcagtgagaacatatgctgtttggttttccattcct
gagttacttcacttacaatgatagtctccaatcgcatccaggtcattgcaaatgctgttaattcattc
ctttttatggctgagtagtattcatatatatatatatagacacacgtacatacatatgtatatatacc
gcagtttctttatctacttgtcgattgatgggcatttgggttgatacttgcacacacatgtttatagc
agcataattcacaattgcaagtgatattctcaggaagcatgatgtaagtgacagagacttactttgta
gactgcactcattcacttgttctctgaatgtgctctaggcagcctgagtttctactatgtcagtgtta
catagatgagaaaccccatgggtggtttccacagaggctgcaatactatttttgataccaaaaatctg
tttggttttgtgagccccagatgcccatatggaaaactgaagtgttgatacctctttgtagccctctg
atgaactgcatggttcaccttcctcagcagtttgagcggggtggggagagcgcctgcttcctagccat
ccgattggcctgaatcatcaaaaatgctatcatgaaacaggttctgtttatctgctccagattacacc
catcatgttctagagtgctggtttcatgcttgaatctagatcaagcctgctttcctcccctgcctgta
ctccctgtggctacctacagtcctgctgctgacagataatctaaaccaatagcacctaattagcctat
acgttgctgatggtttaatttctggaatgcaggtaatgaatgtgtttttgcttatccaagtcttccca
tcagatgtcaaatatagaagaacagtgttcagaggtcctaaatttaaattggagtgagaaattcacag
cgcccctgaactcaggcaaaatgcactctgacaagtcaaccagatattcacagatggtctggaggatt
tgaagcctaatttggtgaaataaaattaaatgagtgaaattgtatgcagtcattaatctatcaccata
cttaaaatgcttcattgaaatttcttttactgcttcaaatgaaaaaagatcaaactatgttatagaaa
agcattcaaaacccttacataacatagataaaacttggttggagacttacagaactttctctgctgct
tcgagaaagttacagtgcccacaaatctattgctattagaatattttattgtattcaacactcaattc
taccataattatgtatatgagaaaaatatttttacctataaaataattattattaccttttaaaaatc
tgacattcttccttttttctaaagaaacatatttagatttagcttttattttatttttgtgttgatac
atagagattgtacatatttctaagattctagtgatattttgatacaagcgtataatgtgtaatgatca
aatcagggtaattgggatatccaccatctgaaacacttatcatttcttcttttcaatgccatcatacc
aaaaggaagtaaatagaatttcaaatataaggacagccatgattttacatacatgcctacgattccac
cacaaaccataattacgtcccccaaacttttaacatttcagatactttgtcccaggtatttcatgata
aggattgggctatgactctgttacagaagggccaaatgactaaaatgtctctgaacaatattgattgc
aaatattctacccagttgtcaggtcaatatgttccaattcggaatttataacattgtatctctactcc
caaaccatccaatctcacctacctcacttccatattatggtgggtgatctcagattatatttaagctc
atggttacttgtcaagtagatatggagtttagcctaacttttgaaatttatgctgagattacccttct
cattatagaattaagtaggcagtttccaagtttagatttagcaggcagtttttttcaaatcacttaaa
agttatatttttttagggcattgaacaggtttgaaatcctaccaagatgtcatgtacacatagaccaa
tagaacagaatagagaacacataaataaaactgcacagctacagccaactgttcgtcgacaaagtcaa
caaaaaaataagcattgggaaatggattaaagatttaaatgtaagacttcaagctataagaatcctag
aataaaatctgggaaataccattctggacattggcttgggaaagaatttttgactaagtccttaaaag
caattgcaaaaaaaaaaaaaaaaaaaaaatgacaagcaaggacttactaaaataaagagcttctgcat
ggcaaaataaatgatcaacagagtaaacagacaaacaccaaatgggagaaaacttttgcaagttatgc
atctgacggtggtgtaatatccagaatctatgaggaacctaaacaattgaacaaacaaaaatcataaa
acatcatttaaaaaatgggcaaaagacatgaacagacatttctcaaaagaagatatacacgcagccaa
taaacatgaaaaatgcgtcacatcactcatcatcagagaaatgcaaatcaaaaccgcaaggagatacc
atctcacacccgtcagactggctttgttaaaaagtcaaaagacacccaatgctggcaaggccgcagag
acaaggggatgcttatacactgttgttgggaatgttaattagttcagccactgtagaaagcagtttgg
acatttctcaaagaacttaaaatagaactatcatttgacccatcaatcccattactgagtagatatcc
aaaagaaaacaaatggttctaccaaaaagacacatgcactcacatgtttgtcacagcactatgcacaa
tagcaaagtaatgggatcaacataggtgtccgtcaacgttggattggataaagtaaatgttgtacaca
tacaccataaaatactatacagccacgaaaagaagaaaatcatatcctttgcagcaacatagatgcag
ctagaggccattatcctaagcaaattaacataagaacagaaaaccaaatactatatgtactcagttat
gagttggagctaaatgttaggtacttatagaattgaagatggcaacagtagaaactagggactaatag
aaggggaaaggaaagggggagacaagggttgaaaagctgcctattgtgtactatgcttactacctggt
taatgggatcatttgtatcccaaacctcagcatcacgccatatatccaggtaacaaacctgaacatgt
accctctggatcttaaaagttgaaaaaaaaagatgtcatataaatattcgtggtcactaaaagtatct
aatgtattatacataaaaataaaaattgggtgaattggaagtgtattctttgtatcaagtcatgtcgg
agatcctattctgctttgatcacagtgtgaattcttttgcatttttgttaccagtcacttctttattt
attgaactaataattacatattctgataatctgtcagaaagataaaaacattctttgtccatgtgtct
gaaaatttttaacctatttttctaatgttttaagtgagaagagcatgttaatactgaaattgtaagca
gtagactgaaaaatcatcccaatccatgggttatatattgaattgcttttaactgtattactaaatat
taagcttaatttattttatttctacatatccccatttccactataggtgatttgtatgaatttaggaa
cttccttctctcatccatttttatattaaaactcagactttctaaaacaatatttctatccatccatc
gttggtaactatgtactgacatgttttgtgcatccgaaaaatgttagcattagtttgtgcgcacagaa
gtaattccagtcaccatatgatgagctgatttatttatttcgtaagtgtgttcattattattatctct
tcagcacccaaatatataggggacttaatgatacctacaagtaaaaacggaagacaaaaacgccctgc
tctctacagaggttaaaatgtttttgcaacagggctctagatctcagctgtgaaagtagggacgagat
gaggctaggcatgcagtgtcagtataatacaatataatcaacatgtcagcatctaatgcaggtgttgc
aaaacaaaatgtacacatgggtagtcaggtaacagaaaagcatgaagtagtaagggctatctatgcaa
gaggttccaagctgactatatactgaaatatttaaacactatgtggggcaaataaaatggacattaga
acagttcgatggtcagttggggacttctgctctttcttccagtctctgaacatatcttaaagccacaa
tcatctatttttatttattgttatacatttatttataagccagcacccctgtgatttaagttctgttg
aaatgctgagttggaaaagatcgatggatgggggaaatttagtgcagaggttttgccccaggttcaaa
atcctttataaaatattaatacatggaacaaatattgaacaattaaaccactgataagttaatcaatc
tgattcaaagtacacctgtgaagagggacatggcaagaaaaatattacagtaagaactagaaacattc
cttcatggctgcttgatatggatatgtcatgtttaagaaaattcttctttagactgttgagatttttt
ttcctgacaaagaagattcactgtcgaggaaagaaagaggtactgtgaaatttgttattgaaaacatg
cacatacttttgtcagaatgagttaaagagtgaacaaaatgtgcctattacttacgtgttgtgctgtt
ttaattcaagattaaaatatttaacgtccacagacaagaccacttttatatgaatattatttttctgc
tttattgctcaattttattaccatttcaaaacacccgtgttgctttctatggccaaagatgtttagca
cttttcatggttatacttctgtacagtccaaaatacaacacttactttacacatacacaaacatccaa
tgtattttgttttctgtcaagtaaagacaatgtctgtgttattaagttaaatgtcactttcaaataca
ggatatgttgatattagaatgttcaactttatttcctcatttaagcaaattacagtgtgaagaatgta
actgcagcaatttataaaaatcatatcacattcaattatgagagcaaacttgttttgtagacttgaac
tagtttcaattaatcttggagttatcatttcaaaaattctaaacagagagaaatacggagtgtaataa
tggtaggtctttgggtaagctgcttccaggaaaagaaagcaattatatatgttcacatagcactgaca
aggagaaacaaaactttggacggcaaagaacttgcattagtctttttgacatgttcctgtggtgtgat
ttattacgtagacaatcagctcaacttctcaagtttgatatccttggaatcatttgaaatttaaattt
taatgaaaattcattaattccaaggccaaaagaagtgattctaattgcttttgagaatcagactatga
aagaattctttggcaaacttgcactgtcttttctcttttatcattggttgcttcgtaggtacttaatt
gaaggtcctctgattatcagcacgggctgacatcagttcactccatgcattttaaacagtaggccaga
tgtttaaaggatcagctgaagcatcgatagcatgctagggtgaataataaaattttcattatctacaa
gaagcaaataaaaagcataagcattttcccccattatcctgaaggagaagatgaatgcctaagcaaca
ttttaagaatgggttgagtgtggcctgtgggaaaatttgggtagaaaacttgtagttagctaatgtat
atactgtttgcctctttagctcaccatatacccacacacatgggcatgcatgcatacagacagacaca
tacaatacacacaacaaacaggaaattcagatatactgaagaaatgtatttaagggattactaagttt
ttgtaaataaaatcctttaagatgctgagaaacaatggaagagaagtaggacatgatggctcatactt
tcgtaatttacttgtttaacgtttgccaaggtttaaattaatgtagatgtttttgtggctaggattaa
tgatctaacagtttggaataattaggcacttttatcacctagaaagcccagaaacccagcatgcaaaa
attctggtatgtctgcattttacacttagatataacagagaaatgacaagtagtcaagtggatagaga
aacgaatgattcttcacacatgcacacacacatagaaattgtctttttaatagtattttaatgtaaca
catttatgcataatttctccatagtgtttatcttatagtgaatatgtgatgaatagtctctaacatta
gtggttttatagattaaacataattaaggctttatatattaaagagtcaattggtgacattctaatat
aaacatgtttatctcatatacattgaaatattagataattcattcgttgagaataaatcgaatgagtc
aaaacttttaacctccactttgagctttgtaatagtatccactgaaaatattcatgaaaatttttaag
tcatttctatttatatattcagtccaaacatctcacaagtttaaaatgtaaactcaagaatataattt
ctgtattctacaattggaagcatccatcatatcagatgaacttatatagtttgtgaaattttgcaaac
tttctgtttagtaaatcttaatgtcaaacattttaacttccaggttgtctttcttttcagttttaata
tccgcgatctttgtatactcgttgaatggattctcaataagtaacccacaaatatatatacatactat
gtacctacaaaaaataataaaaagtaaagaaatcgacacttatccatacctgtcccatagtaataaac
tattcataagtatatttgaaagatatgagaatcataaaagttcgtgtttgcacccttttgtgcgtgga
atcctaggtttgcattttgtggatctagactttttggagtgtggaaataaatgaaacaaataatcgag
acccagtcttatattcaggttatcattttactacataaagcataaataacatttgcagtttgtttcta
tggctagctctaaagtcttagcaacgagaacattatagaaagacttcaactgtagcttccagcagaac
ttctgaggttccgtttatggactaagcagcagttgagggggacaaaactcataggcaattgatcactc
caaaggatagattgtcttttctaacctaatcaaaagatttatagtgaaggcatattcagattttgttg
aaggatatggatatataatcatgtgtgtgtgtgtgtgtgtgtgtgtgttagacatacttaaaacatta
tttgagtagaaaattctgcacaaatggaaaagtataacatgtgttatatccacacatgttgagcattt
acctggctgaaacatcaaaagctgaattgacttaattgaatgttgaatacttaatagttactttgtag
tgactcactattaaaacattatctcaagctttgtcagaattaatttttttaaaaaactcagattagtg
tcaggtttactgaaacagcagatctgaaattactgtgtttttttttcctttcaataatcagtttctaa
tccaaaattgaatatcagttccaactctacattcagtttctgttttacttgtttggactggcttttgg
ttctgttttccacatagatcctctctgtgtaagacaaagccatttgtgcagattaaattttactgagc
gtgttaacctatttaaaacattcatccaaaaagactagtatgaattcttcatatggcaagctgcttgt
tttaaaacttccatttattctaaaatcctttttacttatactttttaagaaacgtattcccgatatac
aaaagtaacacatgctcattaaaacaaattaaaaatagtattgtataaagagctgatacatttctgcc
ttgccccatttaactttcttaagtgttcatgtgaatcatccattcacatcaagacatttatctgtatt
catatgaacgtgttttaatatatataacatatatagaattttatataaactttccttttaaaatagaa
atgaaattatatgatatatttattctgtgtctagctcttgtcacgtaattattcaagaacatatttct
aggttaatatctgtattcttaggtagcattcactaactcctcatctacttgttttcttccattctaat
tgtgtttaacatttcttcatacaattggttgtcatttggtcttcrttcatggagggtgcataatgttc
attctcaccaattctttacactttacataactgcttgatacgaagccagaccttataaatatcaacaa
agcaggaacactgtaatcagctatcagtttcagttgagctgaatgaccctgaatatgtgtacacatat
tttccaggagattttaaaactgacacctcagatttctaagacctggagaaatcagcatgagaaacatt
gatctatattattccgtgaaatgatttcactaaatagtgaagcatctcccacatgtggactctgtaat
ttattagaataaagagttcatgtgcttctgaagaacttgaactactcttctggcctccgtacattggt
ttcttagctataggaaggctgagcatgtttttcctatgcgtttcctttctagctcatcattttagtga
caaaacaatctttcgtggtgttgctctagctatagaattgtttcagattcatttgaccaaaggtggca
aatacaacagtcccaacaaaaacaaaagacctattacagaatgatggaaatgaccccagggaacaatg
gcacctccacatttcttaattccaaggttataagcagtggtgtggacaattctcaattccaatgctga
atcgccttctaatttcaaatacctgtgctaaaaattatttacgtctactgaaataatgaactggaccc
caccaggaatggccgatatgcttgtagtcagagcacaactgtagaaagaaaataacattttaatttat
agaggtatgatgatagctgtttcatactgttttcagaacgatgaatggcctgctcagtagtttcttgt
catcgtactgagacactttaatttcttaccagctgagatgaggaatacgagcccagtgtgcaggtgaa
attgcttaacaggagccattaaaatttggaagagtcagaatagcatcaatcaaaatgctttcagtgta
ggaagtaaacatgtactagcctgacccacctgtcttttcttttaggtatgttggtaatattacaatca
ttttgaggtatccataaacaactgcttagatctgaagaattgtatatctttctttactctgccctggc
ctggggttatggttctcattgagctctaacctttcagaaaaaaaatgtagagaagtggttcaagaaga
atgctttatcttgcttcataaaaatgatagtgatagttttattgaaggcttactatgtgccaggccaa
agtgcgttttattatcgttcccattttccaggcaaagaagctggagcacagagaggctaagtgagttg
tccaggatggctcagctaacatgctgcagttgggatttgcacccagaccaacttcttttcaaccactg
tcccatcctgtgtcttctctactcaaaaagtgtttcagctccaaacctgaaactttaaagaaaaggaa
atccttagtggaaagactaggttttagtcacaaattatctccttccttacattatttgtctctttttc
aaatactccaagctttgattaaaactgtctatcactaggaacattgtagaattgctaaggtggaattg
ttaaaagaactcaattccaattaactttgccattgattactgtgtgttctggaggggtgttctttctt
tcaggttaatgatgctttattgtatatctcaaagattaaaaataacaatgaaggaagtagcaaaccgg
aacttctctcacaatgcatctttcaatctcgtgctttaaatgaagataaaatcatggctgtggtaagg
ttgcaggaaggatgatatagattaagtttcttgcaaactgccctctgaattttcaatagctgtagaag
gtattggttttccaaaaaattgacaaattgaggattcattcagcagtttttttctaggtctcttacca
gaaagtgatcactaaaaagtgtagggaaaccactcaaagttggatagatcattattttcacttaagca
ttttaatttcttgaaggagctttataatgcaacaaagaatttacagtcctgtgtcaccgcttaaattt
tctagggtcatcagtaaactcagtggaaataaattagttcatgaatataattgacccttaaattctgt
cactgtgcaagtaatcggtgggtctgctggatatggctttcgagcagacaggtcaacttcttcaaaca
gagaagaagcatagcataaattgaagacaaataacaaactacttgtttcctccttctttggcatcacc
ctatggatggagtatgcatttataatttaacacaatcaagagatctttattatcctacttttgggtac
aactgcttcgtttctcttttgaatctctacagctatttaaaaatctgttttgtaaaattctttaaaaa
actaaaacatcagattcatatttcaggtatcttactatcttataccaacttaagcatccagtattatc
acccacccttcccctgagtgaatccttagcactgggctcttcctgttttatccctgtgcatgctgagc
tctttctggccttcaagtctacttccgttgcaactgttgtctgaatggtctctctatgtccttcttac
tctctaaatatttcggaatttaaagcctggaataatctaccttagtccaaaagatatgctacactatt
ctagttcacaatgatctcacactgccgttgatacacaacatttaatatcaacttaatatctatttcag
ttcattacgaggtcacttatgctacatcttatattgttgccttggacttttattatctcttcatatat
gtgtttatggtgctcccaccctcacgagaagttgcaaataccatgttagctgtctgatggctttctat
gttgtcaggtataccatttcccaaccagttggcattcaatgattaagttcattaacaaagaattgtat
gtgttgaaaaagatgtttttttcttaatgaagcacttgtttttatttttttaatgaaatccaccctct
taataaattttaagtgcacaatacagtattgttaaatataagcaaaatgttgcatagcagatctttat
aatttttttaaccctacatgcctgatagtctatacccattgcacagcatctcaccatttcttccctcc
tccagcccttagcaaccaccattgtactttctgtttctataattttgactactttagatacctcatgt
aagtggatgcgtgcagtatttgtccttttacgacttgcttattttatttagcaaaatggctacaagat
tcatccacattgtagcatatggtaagatttcctttttgtggcagaatgatattccattgtatgtatat
aacatagctttatacattcccctgtcaatagacatttagtttgttcacacctcttggctactgtaaaa
atgctacaataaacatgggaatgcagatatctcttcaagatcctaaattgaattcgtttagataaata
tccagatgcgggattgctagatcttatggtagttatattttttatttttttgaggaaactccatattg
ttttccacaaaagctgcacaattttatatttccaccagcagtctacatctccaattttcctacacctt
caccaacacatgtaatgatcttgggctttttttttttttttttttaataatggttatcctaatccgtg
aggtagtatatcattgtggatttgatttgcatttccctggtagttagtgatgttgaacatcttttcat
ataactgttggtcattttaatgtcttctttggagaaatatctattcaattcctttgttcactttaaaa
attgggttgttcgaatttttgttgttgttgttattacgttcctcatgtattttagatattgacacctt
atcagatatatggtttgcaaaccttttctctcattctataggttgcttttaattctgttgattgtttc
ccttgctttgtagaagctttttagtttgatatatttctgcttatctagttttgtttttgttggctgtc
cttttagcgtcatatccaaaaaaaattattgtgaagaccaatgtcaggaaatttttcccttatgtttt
cttctatgagtttcatagtttcagatcttatttttaagtctttactccatttcattttgagttgattt
ttatgtatagtttaagttaaaggtccaattccattctttgcaatgtgtatatccagttttcccagcac
cattggttgaagaggatatcctttcccagttgtgtattcttggcacccctattgaaggtgatgctagg
tttatttctgggatctctattctgttccattggtctatatgtctgcctttatgacactatcgtgcgct
cttgactgaggtagctttggtaattcattttgaaactagcaagtgtgatgcctccagtttattcttct
tcctcaagactgttttggctatttggagtcgtttgtggtttcatatgaattttaggaaatttacctta
tttctgtaaaaaatgcgattgggattatgataggaattacactgtatctgtagatggtttggatatat
agacttttaaatgacacatcagatgtatttccatttatttttgtcatcttcaatttctttcaacaata
tttcatagctttcagcacacacatcttttaccttcttggttgggtatttactaagttatttattcttt
ttattgctattgtaaatgagattgttttctaaatttcctgtttttatgttgctagcgtatagaaacgc
aactgttgaatgatgactttgtatcctgcaactttgctgaatttgtttattggttctaaccatgtctc
tgtgtggcgtcactcttaagattttctacgtatcagatcatctaatttgcaaacagatataattttac
atcttcctttccaaatttgatgtattttatttctctttcttatctaattgttctggctagtacttctg
gtacgattttgaaaagaagtggcaaaagtgtgcattcttgtcttgtttctgatcttaagggaaaagat
tttcagtcttttgccattaaatgtgatattcactgtgggtttttcatatacggtttttattatgttgc
ggtaatttcgttctattcctagtttgttgtgtgtttttatcatgaaagtgttgaaacttgttaagcgc
tttttctgcagctattgagatgaccatagatttttagcctttgttctgttaatgttgtgtatcacact
gattagttttcataaattgaaccatttttgcattccaagaataaatcctatatggctctcgtgtataa
tcctttcaatatactgttgagttcagtttgctagtattttaatgagttattttgcttctatatttatc
agcggtattgttctgtacttttctcctagtgtcttttattgactttgatatcaggatactgatgcccc
ttgtagaatgagcttggaagtgttctcttctctttaatttttctgaagaatttgagaaggattggtgt
taattcttctttaactgttcattagatttcaccagtgatgacatttggtcctgggcttttctttgttg
gaaggttttggactactgattcaatctccttactagtttcggcctactcagattttctatttcttcaa
gattcaatattggtagattgcatgtttcaaggaatttgttcatttttttctaggttaacatacagttg
tttacagcagtgtcttataatcatttgcattctttttggataccagttgtaatgtctcctctttcatt
tctgattttacttatttgaattttcctttttttttttttttttttacttaatctacctaaagatttgt
caattttattgatttgtttttaaaaaaactcttagctttgttgatttttctattgttttctatttcaa
ttttggcttttttctgatctaatcttaatatttccttccctctgctaactttgggcttagtttgtcct
tctttttctaagtctttgaggaagaaaatggcaaggacatgactttctttagcagttggaaggacaat
gctgtaaatactcaaaaattaattatttttatagtgacaaaaacaaaataaaaaacacttcaaagcaa
atgaaagtttatcatttaatttatcaaatcactaagcagactgcttgatcagagagaagatactcata
tgatcacataaaactgaaagattaagaggtaaggacattcatgttatcattacatctaactttcttat
ttccaagatggagaaactgagggttggagaaaaagaaagatttctttgttagatacaaacagacagga
ctaaactcagtatagcagcctcctaaattccaaagtatcatgatactgtgattttatgcattcttcag
aaaaatagtagagccactggattctggcaaagaagttatataaaatgtcaagttcttcctttgcctca
gaaatgaagttttatcttccaaaattgattgggaagttctccttatacctcacatcacgtctactatt
ttacattgtttacttttgaagaatttttttaattgacaaataataattgtacatattcatggagaacc
tagtgatgtttttatatatgtaatgtatagtgatcagatcagggtaattagcatatccattatctcaa
acattggtcatttatttgtgttgggaacattcaacgttctccttctagccatttgaaacttctatatt
attgctaactatagtcaccattcagtcgtatagagcactagaacttatttctcctatctagctataat
ttatttttaastatgctttttgaatctgttactataaattgaatgtcacatcgttttgaaaatattct
taatttatgctcaacaggcaagattacacacctgtgataatatctttaatttaaaacattactctgtt
taatttaccagaatatggaaccctagtcattttagaggtggagcaaatttcagtgataatctagtgca
aatttctcatcttatgaatgaggagattgagtctgatataagggacgagattttcgtcaatgagcagc
ttgttaacattagctctgtgatagaacacaggcacttgtcctcccaggccggtgtttcttctactcta
tgatgggctgttttgttgtagtttttaaacagcagcattttcaccatgcatagttttcttccaaagtt
cgttcttaacgtttttgcacagaataactagattttggaagtagaaaaaggaaattctctttgcatcc
ttgtatctctggttattttctttgtcctttgatctctctctcctcccctcccctcccctcccctcccc
ttcccttccctcccctctccttcccttcccttcccttccctcccctctctcacacattagagaaagag
ttaaggtattaaagaatacataatactattaaatttccttcacatagagaaaggaatgaaaaaaagtg
aaaaatggtcctcaccaaatgtccaaacttctgtaggtcatttccatagtatcagcaatgtcctgtat
ggtgcctcggggatatgtaagcaaatgagcaagtggttagctaattctagctttggcaaacacttgtt
atggcttacttgaggagaagtcacttctccaaagtgaaaataatgtgcacaggtcaattagaattttt
ttgtagaaaaggaaaatactttgtagggacatggatgaatctggaaaccatcgttctcagcaaactat
tgcaaggacaaaaaaccaaacaccgcatgttctcactcataggtgggaattgaacaatgagaacacat
ggacacaggaaggggaacatcacacaccggggcctgttgtggggtggggggagggtggagggatagca
ttaggagatatacttaatgctaaatgaccagttaatgggtgcaggacaccaacatggcacatgtatac
atatgtaacaaacctgcacgttgtgcacatgtaccctaaaacttaaagtataataaaaaaaaaaaaga
agaaaatacctccttatgctcctgacttattttctttttggttcctcagtcctcttctctctctctct
ctctctctctctctctctctctctctctctctctcacacacacacacacacataccccacatatacaa
tatgattaaggatatatgtgaataatgaaagcttcttgtgtatagatttagaagtctaatggacaaaa
tcaatattttcctatgtgcatttaattcccccctttgatttaggtatatagtctttttttaaaaaaga
gaaaaaaaattaggtgaccttaaggtatagatcctactttcaaaaggtttacagaactagggagagga
acatggacaagatttaaagaactattttaagcagaataaaatgtgatttatgaacaaagcatatatta
tttgtgcgtatgtgtgtgtgccaacaaagatgcaattaggagattgcacagggagatgtcattagaac
caaccttaacgggtgagaagtctttgaagacatttagaacatggaagatctctgacagagggaacaaa
ggcatagtgacaaaagtcaagggcatatttaggactggagagtggtatgtgtggcttgagagtgggcg
agaaaaaacaacaatgcctctgtaataggaaagtagacagaggcatgacattaagagctttgccagct
gtgctaaaagtagtgaacaagagctaacaaagtgaagaaatgtaccttttctgatgtgtatcattccc
ttattcatatacttcttgagggggaaattcattctgtgttgatctagtaaactactacaggaccaaat
gataaaaagaagtataggaaagaatgtttcagcatactttacgagataacttccttgtagctattctc
catagtattttgagcatcacaaagcaatgagctgaaactgtctaagccaaaattgacttgtcatctgt
tagggatgcttagatgagaattctacatttgagagcttcttagattcattgaccactatgtcccattc
taagatccatgaatgcgtgacctaactattacaccttcttttagtctgattgtcaattttgtattttc
aattgtgcaagtttctaaaactattttaggaagataaatctagcagtggtgtgggaatagacaagaga
gaaggggaaagactcttcaggaaactaaactcacaatttatgagtattctttattgcccaagtcttcc
caaagtctttcatcaagaaagaggcattgcaactctccttttatagtttgtttttattctggagcagt
gatgttttggtggagttgttcctcagtgcgtaattaaagggcctatgacaattacagttcatctcctg
ctgctcaaggtactgcagatatttggatctactactctcattcatttccaattaatgtcagctttaga
tttccttcagtatgctatgttataaaatttgattatcgttgtgcccaccttcccacttaatttcaagc
aggtttctcgattacctgactaaactaatgaaatctgactaacccaatatctgtggacagtagtgtga
tgttactgatttttgtatgattagtcaagtcatattcatgccacgttttcatatagtaccataaagga
tattcttctcgtggtccttttcttttattctgaacatacaatgagaagaccggtaaagtgggctagga
aattaaagaaaaatacaaatggcaaaaaatatgggtcactcgaagtctagaatagagagcacaatcaa
ttttgaattaaggggtgataaggtgatttggtcaggtgactggtgaaacaggaaagaaactatacttt
ttgaagtgtttcatccatgtgttaagattcatttggggtcaagaatctaaatttcatatccctgggag
tggaaactaagtaaaaaaaaaaattatggaccttggtttaatagctagaggagcaagagtgtatcttt
atgtgacttaacttctatgtgaaaagtgaaccttaagattaattattgggggaatttacttactcagg
ttctatgcctagatggtctgcccaactaagaaaacttattttcctgttactccatcctatttttcata
cttttatactgcacttgcagaaaagcatatatttctacccaatacgaaaattcctgggaacatatttt
tctacatttcccaaattacttcaaaaagtaaacttaggttatttcatgatctccattacaatggacag
gtggccttattgaatgttgtcctgtgaatacaaagatccagagtttaaagaacaaggtgtacttgcat
ctcccacttagggtttgcttgtggtggagagagaatctagtttgcttaaaaggatgacagtgcagtgc
cccaaaatatctgatatcattaaaagtctcatatttgtctttcgtaacttctctagggctgtcgatga
caggagacccttaactcctatgccttgattatgtgaataagcacatgaaaatattttagttatcttag
ttcacttttaaactaagtttcaattatcactagattctaaatatcatcattgagccgttcttaaggaa
ctgattttctacatattcattcacttcacctatatctagtgtgtctactatttgccaagaaaaattta
ctctcttaattcagcattccatatacttaacatcataaaaagtaggccatttttagttttctaaatta
tttatttaaacatttctttaaaattacattctatcattacactatatttcaacactacagtaagcagc
ctattttgtgatttttccttatataaaatacataattgaaattaaaaatgaagttaccaagagccatt
ttcactctggggaatgcacatttataaattatggggttattttttcttcatcagctttcatattatta
aactttgtctcttcataattacagagatgactagacacagaagggaatttaacatttggtgtgcattt
gtctaacctatactttatgttagaaaatacatttccatttgaaaaaaaatcagtaattgtgggtgtga
tcaagagggcagcctgaaagtcgggtgatgtgactcacacctgtaatcccagcatttttggaggccaa
ggtgggattatcgattgagcccaggagttcaaaaccagcctgggcaacacagtgagagcctgtctcta
ttagggggaaaaaaaaaaaaagaggaagttagcctgaggcaatgtaaatgaaatacatatttcaagga
tatttatacatgattcacgttattcatataaagatgtgccagagaagactataggtacgttattttac
actattttgctaggattttaagaaattcaatgtgtttttatttcagttaacttagaaaacttacctaa
cttatacttctcatggacacaaaagtttttaaagataggatcaaaaagcccacatggtgaagcatttt
gaactggatgaaaaacatctattatctttaaaattttatgatattactgattgtaatagactcccttt
ttaagaaatcattccttatagaacataaggtttacatttacaatcaacaatttctatccttactacaa
taaaggcacatataaaaagtacagttgcatatttagcaggtttaattgtacattttaatgtagaaatc
aattcaattctttcatttatcagcattattacagtgatttcaaattaagcataggtaactttgatata
gataaatgatgtacacagcagttaaattttattttcaattatgtagtaattgtataacctaggcagta
taatttgtaaactttgtattttattattatgcttctcccacttggcataagcacaacacttcctaaaa
gcataattttctatagacttaataactccctaaaaacctgttttggacccctatactatttgatatag
gcagaaaaaaaacataatccatgctcaaatttgaaaaatgactggtcacatttggtataatactaaag
gtaaataaaatcaagagtctatgaacatttccggacctgcacatttgttttattaaaatgcataattg
tctttagtgtgtttctatttgtttatactctactgattttaattaaaaataccaaaatacgtttatta
aaaaactgtcagaatctaagttgttaaatatacttaactaggaaagtaactgtttaaacgagataatt
tatagagaaatgtggtgtattgccaattagatgtcaagatacaatacaactgataatgaaaaagtagc
attttcttagggatggaatacagtgtaaggaacaccccagtaagaatacaaaaattactgaaaaaaaa
tcttccttcctgaaaaaccaagtgcccttcaagtgcagaacctcatccaactaattgttaggtatcac
taaagcctgataccttcaattttctggatcattcaagctgtatttttgagtccttatactagaggagg
taaagagctataaaaacacttaatggtatctgatgtgaactgtggatcactttgacccatcacttcta
cgtctacatcttggataaattcccattgttgtcatagattgtacaggtttaatggtgcgtttgtggag
ggggctcgcttatagaaaatggagactctgaagggataaggaataaatgtatcacttcaggtctttta
tttgaaattggggtccagagagcctttttgtatcagacttgtcaaaccatttccatttagtaattata
tatgcactagcacttattcctacttacctcacctctttatgcccatttccttgtagttgcggttatgc
atgaataatttattgcaccccttaccaacaatggaataaaacttccattctgaaagctttccatactc
atttccaatagcaatagggtttttttaacggacgtattacaaatgtacgagtcagttgaacatagtat
tcctctttgtaagaactccaagtggatgcatgctgttgtctcaaatctcaattagaccttgctttgag
gtcccttcattgccagtcatctgttctccttcccctgacttgagtatttctccagatatagataatac
attttcccaactctgtgttccaagaactgacagtggctttcattcattttgtttgtttgtttgtttct
tctcgttctcaagtatcccacagtctactatttcttccctccattcgtttgtcctttcagagtttcaa
aatccagcataggtacttcttctaaaatgtcttacccttcacatacacacaccacttgagaccccatc
agcctctgtccacacagtttggttacattcatagactatttttatacatcaaaatatttgaaaatttt
agggtaaatctcagtagtcattcatttttgctcttattcaaccaatactagtcaatcagcctgtgcca
ggttttgttgcaggtaccaggtatccatccataaagaaaacaacgtccctttgttgtggaatttacat
tttagcaggggaggcaaagaacccaataaatatgataaaatatcagattaaaagtacgatgaaaaaaa
tcatcagggtaaaggaaaaagggaagcagtattttagcaagagtggtgaagagaggaggctgagagtg
tgacatctgagcagagacctaaatcaagtcaaggaatgaaacatgctactatctaaagaaatgagtca
ggataaggaactagtaagagccgaggcccagagatgtgaatatgctgttccaggaacagcaaagagac
tggttgatatgatgtgaaaaatgagaagaaaccttatgatatgtgtcaagagaaaaaaaaaatttaaa
agcatgcttgggaacggaggcctccagatgaaaaaaaaaaacacagttcaaatccttgttcatgcatt
tagtttgctttgcaatcttgggcaaaatgttaaatttctgtacgttttatcttcctcatttttaaaat
aggcacaaggacatctacttaataggttcattgtgaggagtaaatgagatgatatatctaggatgcct
ggcattatatcatacacttaataatacactgaataaataatagttatgtctatttatttccttatcgt
ttttattattatttcaatgcacagacctgttcataagataatgataaatattagtggcagaaactgaa
gatgttataaattattaggaggcgggaccactcagttcaatgtatctgttttaatatagtcagcaaaa
gtgtgaagataccaacaattaaatttcaatgcattcttccatttcactagttttataaactgatgaac
taccagaatgtcaatgtatgaattgcatactcattcttaacaaacagatttgcaaaattatgtgtaaa
attagccctcagccttccaatttgttattgtcatatttcatggaaatacataatctgtaaatttttgt
tttaatgatatgtgaaactgcctaaagtagagtcttggcaactacttcacatttgtcctccagagata
gtggataaaagtgtcaataaatgaacactctatattcactaatcacaggcaagggacaaggaacagag
tggtcacaaaataccacaaaattaaagcacattccaaattaaatatatatgtttttattacagataat
gtttgctagactctttctaattatctgcaaagattttaggaatgttttaatgttttaatatttacaca
cctgtgtatttcaagttcagtcaaacactattgttaaaactaaatcttctcatctctaataataagat
gtgaacttatcttggaaggtggttattaggatgggagagataatgtatttcattcaaagtaaaaatat
ttctctgtttctatctttctctttctctgtcatctatttatcatctatatccaggtatctatgcacct
atgtagactagcattcaatgaaccatagatattattagtagtagaattgttactaatattaaaataag
aagtatttaagaagaaacatgtcctaaagcataaggtcaattattactctcatgttttttggcatatg
aagcctaaaaagtgtcaatttcaagagagtattaataaagattgtgataactgaaaggttcctgcttg
aaattttgtgtggtcttacaaatatataaactctaagcatttcagtgagccaattactgactaggcac
tatgtcttatgactcttttgtcatagtatgtaaaaaacaaagagtagagacatcataaaaattatagt
agatgggcactagggaattacgcaaaataatttgtagatttaatgtgaaaccaaaacatctgttcaag
tcaatttcccacaggtcatgtggcaaagagtatgagttccagactgaggagaggaaaaggttgttctt
ccacagggaaataaactgagtgtaataaacataatttttcttcttaagcattatttaaaacaaaaaaa
atgccattaaatctatctttcctgcctctcttatcaatgctcccttccctttcaccacttgtttcaaa
ctccaagccttgggattttattttggctttttgccttaatgtaactaaaatgagagcatcacaaatat
gaagctcatcaaataatttagcagcattttcccctgtttttaactttctctttggaaacgtagatttc
gaaatttaagggcccaaaatatgaaatgcaattataataggccatttgttcattcagcttgataaact
tgaataaatagtattgaacttttaatgcaaaaagaacaaaacaaaatagaactctccacgaagaaact
tttcaatgtttgcatttctgtgtgaggagaagggtaatgaatgtgggaaccttaatggaatccatgtt
cttccagtgatgacaagggtcaaaatggagaaaaatggtcactttctacccagtacattatattagtt
ctatgtggacaactataacatagctgatgctggttttcaggccataaatgtaggtatgtattttccta
ctatttataaggcaaaatttctatttgtttaatgatttctatataggtagattattctgtctttagga
ttaaaaacgacctgtagaccaagagactttctaatgtccaccttagagtatatggcttttactgttac
agtttccatttcctttgcttgcccctttgagagaaggaaaggagacatttgggatacatacatcaatg
aggagctattaatgaataaatgaatgaaattgtcagtcaatttatccacatgatcatcaattgccaat
aattttatcacctctgtgggattaagtagaggtaacagtttagaaatttgattttttgaaagcattta
aaatgttcaaatatatcactctggtaactaagggaaagtgtattattttcttatgcttagtcttattt
tggttttgcctttttaatttaaattgaacacttatatcaaagagcttgcaggattataatttgaattt
ttgaagcaaagatcattttcttaacatcaaacaaagagtagatacaataggaataaaatcggcagaaa
aacaagagtatcaaggacagacggggagggtgggtctgtgttagcatgtattgctatgaagaaatagc
cgagactgggtaatgtatttttaaaaagagctttaatcgattcatgattctgcaggttgtacaggaag
caggacaccagcatctactcagcttctggggaggcctccgggagcttttactcatagtggaagatgaa
acaggagtaagcatgtcacatggccagagcagaagccagggggaggttgccacacatttaaaaaaaaa
aaaaacaaaacagatcgctcaagaactcagctgctatcatgaggacagcatcaagctgtgagggatcc
acctccgtgactcaaacatctcacaccaggccccaagtccaacacttggcattatatttcaacaagaa
aaaaagtttaattggctgatggttctgcaggctgtacaggaagtgtggcacaggcatttgcttggctc
ctggggaggcctcagggagtttttgctcatggcagaaggtgatgcccacacactttaaaaaaaaacca
gatctcatgaaaactcactcactacactgaggacaatacaaaaccatgagggatctgtccccatgacc
caaaaacctcccgccaggccccaccaccaacattgggaattatatttccacttgagatttgagtggcg
gcaaatatccaaactatatcagggctcatgtccagttatatgtcaacatgcctgcattcgaaacatcc
tgtccaaatcactgccttgtcataatacttatatttttctttattgaatacgaacacaagaagattaa
ataatagcatttctactttaaaacagtgggcaccatattaacattggaataatagtagtaataacgat
agtaataacaatgatataggctgggtgcggaggctcacgcctgtaatcccagcactttgggaggccaa
ggcgggcggatcatgatgtcaggagatcgagaccatcctggctaacacagtgaaaccccgtctctact
aaaaatacaaaaaaattagctgggcatggtggcaggcacctgtagtctcagctacttgggaggctgag
gcaggagaatggcgtgaacctgggatgcagagcttgcagtgagccgagatcgtgccactgcactccaa
cctgggcgacagagcgagacttcatctcaaaaaaaaaattaaataaataaataaataaataataacga
taaaaggatatgtgtaggttttttttttaataggctgttaacattaataggcattgtgatttcaggga
tatcatcaaacatcctggtcctaagacatcccctattgaataggaagggcttaagttaaacttctcat
gagccacaattttctgattatatgtttggtgtgtgtaatagccacctcagtgatgatttgattagcct
ggacccttacataatcattgaagtatacccatgttcctttatatacttctttagtgttgaaagctcaa
aattaagcaaaatagtccccttgataatgtttagattcttaacatttgctttctaaagctggcaaata
ctctcttcccagtgtcatgaagttaaataacatgttgcttagtgaggactttaatgttgccatgccat
aggaagaccttattcgaaatccccttacctgggagaatgtcagattattaccccccaacttgtttaac
acttttaggattttaaaggtgttcacatttgtattagaacaaaatactattgagaaacatttctagaa
aaaaattatctttccaaattaaaatcagtggtatgtaatgtaggagtctgattataatgattaaaata
catgggctttgggcatactgcctaggtgaaactcctggtttattgcatcactattagtataacctatg
ggagttaacctacgtaagcctcagttaatttttctctcaaattgatctaataatcgtctctcataggc
ttgttttgatagatatttcagtgtatataatatacttaggacagtgcctgatatcagtaagtctcctt
ataaaatgcctttgtatttattcatgtcaaaggaaatatgcaagtattgcattcacttcctaggtgcc
tttttgaattgagctttgcatggttagtttgtataaaaggttcagtgaactttctcataatgattttt
tattgaacatatggaatccattaagtgttagcaaaagtcactatccactgagctgtgtccaggggctg
acagttatgtctatctcttgcaaaaataaacacatacataaatgcactaagacgtatattacctgtcg
tcatctcttagagcatttccatttttcttttaagttttttctttcaatgggttttttatctttgtgag
tacatggtaggtgtatatgtcaacggggtacatgaggaaggtgtatatattgatggggtacaagagag
gttttaacacaagcattcaatatgaaatagtcacatcatggagaatgggttatctatcccttcaagca
tttgtgctttgtattacaaacattctaattatactctgttagttattttaaaatgtaccattaagtta
ttactgactatagcaaccctattgtgctatgaaacagtagatcttattcttatttttctaacatctta
gaacatttccacaaacactacctgcttgttaaatatacctattctaatcttcatataatcaattactt
ttttcctctagaatgtactatgacacatccatggggaaaatgtagtaatctaattaagactatttcct
ctcattttatatttaaaagaatgtgctctatcaatttatttacttgtacagccgtaggcaacctctaa
aatatttaaagttcttaaaagtcagatatttcagttaatattgtgattatatagttgattttgatgaa
catgttcatctaccagaaataaattatacacacacattgatatggttaggctttctgtccccactcaa
atctcattttgaattataatccccgtgtgtcaagggagagaccaggtggaggcaattggatcttgagg
gtggttttgcccatgctgttctcctgatagtgaatcatgagatcagatggttttataaagggctcttc
ccccttccctcctcactcattctccttcttgccaccttgtaaaggaggtgccttgctttctactatgc
cctttctactatgcccttcaccttctactatgattgtaagtttcctgaggtctccccagccatgctga
actatgagtcaattaaatccctttcctttataaattacccagtctcaggcagttctttattgcacata
tatgtgtgtgtatgtgtatgtgtgtgtgtgtgtatatgtatgtatatatgtatacatatgtgtgtata
tgtatgtatatatgtatgtatatatgtatacatatgtgtgtatatgtatgtatatatgtatacatatg
tgtgtgtgtatatatgtgtacatatatatatatatatatatatatatatatatatatatatgaacaga
gagagagagagagagggaggaagggagagagggagggaagcatggagaaagagagagtaatagcctaa
atagaaataaaactagctccaagtacaggttcgtcaacactctcctatcatacccccaccaaagttaa
tgttaaccacttggagccctgttcttccttagttgtggagtactttagcaaaattttaaatctaatta
tgcctaattcaacgacagtgctaatttgaaagtgttagaaactgaagacctataataataatgagagt
tacaaaacataaatagtgagacaatgatgaatgtagtggatgcatgtacgagggctatcatttgacag
tagagatgatgctcaaggacagacaatgagtctttcaatgtgtggagaatgtgctgctgttacagtga
tgtacaggaaagaaacaaaaactgaggaagtatcagtaaacaaaacactcaaacatatgagtatacag
ctagaataaaagcaacagtactagatgacaataagcccaatgttaactcagaaagcagaaggttttta
agaatttggggaatactgtggctgatgatacttatgtctcaagccacagatgccatatgggctctgcg
cccagttgaatcggcaccacctggcagtaagtgggcaggtccacgactgccaggacatcccttccaac
acttgtggagatcaccaggaaggggggagagacctgccttgacagattttcaatgtgggcgaaacagg
tctattttgagaaaagatgttcaatagaacatatgtcagcaaggaagaagagatgatgcttagttcta
aagctccaaagagctggcttacactccaacttggggaaaatgcatccgggaaatgcaagattaatctc
atcttagccattcttttgaatggatggacatgacccctttctacttgaagacagaaaacataaccata
ttgatttcaggttttcttcattggtttccatttaggattgttcctccccatcttctttctgtgtaggc
atcccagttcccaagtgttcatgaagcacgtatggccttcaggggatgtgtctgtatacattgttatc
ttatggatgcacggttttgtctgcaccttggttctgaatgtctttactcttgagcatctgcccatggg
tccccttctcaaggcctcaatttcttgagtttaacactgcatggcccatgcagcttttcagttaagca
tctcttgctatgaccaactcttttcctcagtcaactcccacactcttttcagggacaggaaaaatgta
gccacttgctggctgcactctgaggcctcaagaaatttagtgaatctgcctttgcccttcttgctgat
gaaatactgccacatcaggccccctcttcggaaacctacaagcatctaattttcttgcttcctcccca
actttctttttgactcccccccatccagagagttcttatgtctactgtactaggaaaaactcattctt
aaggtatggttttcaaatcattctctggtctggactttagctacggttttaaatgaagaaacaaccca
gagccaaaatataatgaaactatttccttcttccacagagtggaaactgctttggggttaaagggcca
gtgaaccaaatagaaaaggatctcagggaacacagattgaagagagagaagaaaaaatatgaaggcat
tgttggttctcttttgagtttaaaatctagtggggattgtaagcacacacacatatacacacacacgc
ttacacacacacaccagtgaagttatgaaggattttgtcactccaacgaccttgaatttgattatcta
ggtcagttgttaccaaagtggaatgtacatgcccaataatatgcgtgctaaacagttggggtagtgag
aaaaaatactttttatttatcttgttctctagaaattaatattttgattgtatattttatagtgtatg
tgatgtgtaagttgtgtctacaaaactagtgtcaatgtaatttaaaattacatatgtctgtgaatata
tatttatatagggtacatgcttaaaatgtgtttacttctgaggtacatgaacatttttcccccaggca
cagaaagacaaataccacatgatgtcacttaaatgtgcaatgtaagaaaagttgaattcatagagatg
tagagtagaatcatggttaacagaggcttgggaggtggagtgagggaatagagagttactgttcaaag
attacaaagtttcaactagacagagggaatacattttgagatctatttcaggaacattttgagaccct
cactctaagtaataggaaatcattactttagttaacatatttgaatatgagttgtgatgttctatatc
gtttatttggattctactaacccacacctagatttttatggcattacctttttactcactgtgaatat
cctactcatagacagatgccctgggaacttggacttgaggcacccaagaactgagacagtgagatttg
ggggcacaaggatctatggataagttcatcttagtgatgataaaatcaatttggcatgtttcacggac
agtgtgcattttagaaagggtaaagacttggaaacgggatatttttgagcccaagtgtttccaataaa
tagctgtataatttgaagcaaataattgattttttgttctctttgtgccctcgcctgtaaaatgggag
aaatgtattcctttctcatccttctcatgaggccattgagagtatctaatgagatcagactgtgacat
agcataataattctcatttcttgaaggcctattatacactttgcaagcactgtatgtgttgtttctac
ttctcttgttcgtttttcctggaataaatatccccccctcctttacattggattgccattattcaccc
tgtaaggaaggcttcatggttctcattttcatctgagaaaacttaggctcagagaagatcagtaactt
atctaaaacacacacatacacacacagacatatctatgcccattattcttaacctagtttctctattc
aggagttatctctgctgtctctgcttctgattataatctgtgtaagctgatccaagtgacacgattac
agggaaattgtaagccctttgagagcagagactacctattgatatctacattttaaaatttgatttta
gccaacctgtttatatgcaatgactaacaggttagtttgacttgcaataaatattccaaatcctagac
taagtaaatttattaatgtaatgatttaacttgattttttcattggcatgtttccctgaagtcgtcat
gcaaaattgaaaaaaaaaaaagtatagtgtgtgattctagattgaaattcaggaatcctccagggtta
ccttgtttgctttccaaatagttcagattgcttagtctgaccaacaaggtccctgacacttggaactc
tgtctatccctctaattgactttgtccctgatgacctcgcccagagatactcttcaccccagctatac
tgtgttgctagagtttctctgatatcccatgctattgtttcctttgttctcttcataaggtaccattt
cccacccgccaactcctgttttcctgatggacttttgtttcaccttacaagatcattgctaatgtatt
tattttgagaataaaaagtgtaggaaaggtcacgggacaaagctgtacaccagacctttcccagacga
acctagtgtataatctccctagtccaacatcatggcttaaggcagtcgatagatccgtcttaatgtcc
cttttgagttttctactattattatatgaggatttatttttgtctgaattcctccctagatttgccct
agagagcaatgactatttacagtttattcctctttgtatctcttatgttaaggccagaccttggcaca
tattctagctgattagaagacgtttgttgaatgaccaagtgattgaacaaatgaccatgtgctctgcc
acagtccggtcagttctactttggtttggttatgtgtttgccacattaaagttgtagcctgggaagtt
cagttgtgagatgtctgcagaacatgaaaaattggaataatgaggttatttctaaaattgctataatt
taaaataaatagtggtttattccatatatgaatatacactggaaacaaagaatttctagaatactgga
gattcaatgataacatcattgaaattaaataaataataggattatgctagttactttctaatttacta
gaaattgaccgtgtgcatggcacgtataatgagtatcatgggatagttacaaaaagtggtgcttagtg
agtttctgtggaaaatctcggtaccaataaaacggaggatttccagaaatcgatattcctcaaagctt
gacagtatttatgcacggttacactttgtgtgtctttcgtttgaatcaatggaaggaggctataactg
aaaattattgttttagtgtattatatctttaataataagagttttaagaatctatcattagaaataat
tattcctcaatttgtaattctcaacatttgaacaaataaatgctctgtgtctatcagttaatcttgcc
catgaagatttaataaagcacgctagtttttacaaatgtgattttagagatggtcattacttggtaaa
atattttgtgttaacacttccatgaatatgttctgtgggaatatactgcctccacattgcttgctcat
gaagacatgatttttcacatcatcctatcagtattttgagaaagagattgatcccatattctatgagc
atttgaacattctctagtatttttgtttaatcattaaaacaacccttgaagtctatgtgctacactgg
ttatttccctcttgactttcctttacagataaccctctatcataaacaacctatctatatttgttgtc
tccacatcatgttcccagccctgctttaacacactgcacattgacttctagcagcaaaggctcatggg
aggtactctcatcaaggacactgatggtcctcatgttgctaaatttggtgggtcctctacagtcttta
tcctagttcaccttattatggaccactgtcaactctgttctgcttaaaacactctgttccttgcttat
atgactctacactcttaactcctttgtgaattcctcatctgcccttccattaagtattgacgacatcc
ttcatagttttgatctaggacctcttttcctcttacttgacattatgtgggtaatcttgtctttgaac
gcaattaccattcttatgttgatgacccttaagctataattccagcccaaatcatttttctgaggaag
ctacaagaatacacaaatgtctaatagatctctatttagatgtccctcaggtgcttcaagcttaaaat
actcacctgagctcatcacctcatctataaattctgcttctcctccctggctccctgatttatttaat
atgaccaccatccacttagttgaataaagcagaagcctggacaccatctatacctccaattaatcact
aagttttgttgttaaatacgttcttacattttctctctagaatgtcttattttccccatctttacacc
caaaaccaaaagtcagatgaccctgatctcctgcttagatttcaaaacactatctcttgcctagactc
tggaatttcagtcttgctcctctccaatctatttctacaccctagactctggaatttcagtcttgctc
ctctccaatctatttctacacaaaagctagagtaattttttaaaaaacaaaaatctgaatgtgttcat
tttctgcctaaaagccttcagtaattcttatttgttcttccagggatagagtaacaactttcagacct
agtttattagctagttctttaaccacaaaggactctctcacttgtctactccccctaacacacttcgc
cctaacctttgccattcctccctttcccttttccttcccagatggacttaagtcctttcagattctta
aatgtttcttcctccagtctcttacatctcttttccttgtaactctaaaaactacttagcttacgcaa
ggaaaaaggtctgtacaattcccggaatcagcgatcctaacgttccctgttgtttttttcgttgggac
atgaattcattcacagtggctctaaacatcaccacccctgcctatctctcccattcctactttatctg
agcttatccatactcttgaagacttacatattttttttctaccaggaaatcattactagccttattat
cccactgtccaaaccaataagtctgattaggtatctgtatatatttaatattactatatgtgtttttc
taacactctagtagaggagaaggtgtatttctttctgttttttagaagcctgtatttctgctattata
gctcttaaggaactctcatgcaattgcctactagaatgtaagttacggtaggataagaactggatcag
tcatatcacacatccacatataggacctagcaccatatctaacacacagcaggtactcaatacatttc
tttcccaaataactaaagagtttaaacaaaccaaaatgattaaatgagaagtaactgttttggtaatt
cttgtgtccttactagagtctaaattgagtgatttttatatcatcagtttatactcccctttcccaac
cccaattctttcttttttaaattttttaaatcaaatatgccttaaaacttcaggatcagttgagtaaa
atgatgcttttgtcgtcttttgcaaaataattgtatttcagaattttgatttagatattataaacaca
cctaaaataatagctttagtcttaagatgaagtgcttcttaaactccctaagatgggttggactatgg
atatgaacatggacaatatcacattaatttgtgtacacagttctaacacagggtctggcatataagaa
caagtcagtaaatagttgttgaatggaattgaaaatttaagtagcaaataaagtattttgacctacaa
agcaagaaatcacattttcttttttgtcacagttccttaggaagataattaattttttagtatttaag
gatgttaaatatttattttatgttctatttactaggcttctttttatgaaaattaattggtgaaaata
gcgtacatatcttcctttaccagaacatttacattttgggcagtaacgctggcttttgttaaaaaagc
aaaatatgtgtgaaatttatgtttgagttgatttcaatgcattacatttccattttaaatcttctttg
aaatactctatttttgacaccatgaaactgtattagatcttagtatgttagcaatgttttgcagtttt
agagccataattattttaatgaccactttcagcatatacgttttctacaggaaaaataatctcaagaa
catgaaaagtgaaatctatattttgggtttcaaaatgatacattttagctaaaatatcatagttttaa
tttctcagtgaaaaatatagtgtggtaatttatgaagagactcagtgtttaaaaattatgactctata
gtcaagtttatgtttataggacataggttattcaattacatttaaaataattaatttagaaaatgtga
tcaatgtaacaaattttacctgttcttttctaaagctaaatttgttgtttgaagtgtttcttctaaaa
tgctaatgaactatcaatttaattgttgagcttagagttagaaacttaattatattgccagaaataaa
gaaacaaatggatcccaaaagattcacacattagaaatgtatgccagggaaatgcttttgaatgtgtt
caagtcatggcttctaactcgtaacttataacttgtgttatgtctggcttcattcccttaagaaaaag
gaataataatgccttcggagagcatcccagctgtaagagctatgcattggtgtctaaaaaagcttctc
actcctcataccatcctggtctgggaatttaaaaaattgtcatcttttgataatctgtatcacatagt
cttctgcatagtcatatgaggttagaactgccccataacttttgcagggcctatagtaagtgtgcaaa
tggttgcctgcatgccacatatttaatatttataaggtataaagtcaacagactattaaatatatcct
atctgctttccttgacaattatacaatcataatgatatggacatctagattcgatttagaattctctc
tctctcattttctttttcttctttctttctttctctttctttctttccttcctttctttctttctttc
ttctttctttctttctttctttctttctttctttctttctttctttctttctgtctgtctgtctgtct
tgtttttttaaatagtgcaagcagtttattccctggcaaggaatttggaaaaaactcaaatagcaaac
cacttgatacaataaaataaattccttagagttttgtactggaatgaggcagcttggttagagctaac
cctaagcctgttatttaggatacattggcttttcttaagcttaaaaaaaattttactgtgttaatgac
atttaacatgagatctatcatcttaataaatactacatgcacaatacattattattgactctaggtag
aatgttggacagcagatctctagagctaattcatcctacttaactgaaatgtaatgtctgttgattag
taacttcctatttcgccctatccccagcccctggcaaccaccagtccagtctttgattttatgagttt
gactgttttagataccttatttcaagtaagtggaatcatgcagtatttgtctgtgtctgtcttgtttc
acttagcgtaatcttaaggtccatccatattgtttcatattgcagaatttccttttataaaggctgaa
tagtattccattgtgtatatataccacatttatctattcatctgccaatgggcatttaggttgtttct
gcatcttagctattgtgaatctgttgccttttttccctacctcctttactccatcctgcactgtgagg
aactctgtgcacatagatctggtcgccccatttcccacccacatgttcaagtttttcccactcacctc
atgcaaagatttaccccttagccatacccagtaactgactttgaaacatttgcccagggagttgaggg
attctgaatgccagatcatgggagcggggcttctagtgagcatgttggcttggtcctacagactccta
atcagagctttgcctttgaaagcatggggcccaagggcaaggaccctacttgttaaggtctaaatttt
ttttctgaaataaccacatcgagcttttatgtgtagatggcctaaattgggctaacccagaggcagtg
acactcaagtagtttacatctaagcgctttccatgtgcttcttttcccatttctgttacttcttacaa
aataaaaaatcagcatctcaattaccctgatttgatcattgagcaatctaaaaagtatcaaaatatca
catgtagcccccatatacatacaactgttatatatcactataaataaatatatacacattatatttaa
aaatcaatactttaattttacatgtttaacaaatcactagcatatacattccagattgaacttacgag
ggatgtggaaaagattcagtgactaaataacaataaagtactctaaaaatgaaaatgtgaaatggaga
cagtataaatctaaaatcatatcacttatgaagtattgtttcaaataaacaataaaatatatcttcaa
tcaatttaattttattttagttgtataaaatctttcggtcagcattaacctaattggaacactaaata
ggtacatctaaaaaatataatcccccccaaaaatatgtagctcataagagataatgcattgaacacag
ataatattggcgttaaaaacagaactctaccacatttgcaacgaaatgtttatctgttcttcctacta
gaaaataataaaatagttctgcatgagcttgaactcgaagtattaggtgtacaaagaccttttagtga
atgaatgctagctgaaaagcaaattttaaatatgaaaaattagcaagacaaacatttgaatttgtggg
agatgagtaaaactcctataaaaatgaattgtttagtgttaaacagattgtgtatgaaatattaatgg
catattgtcctgagctccccttccgctgtttccatgtagatgactgaatttcaaacagaaatatgcca
ggaatgattacgtgaatgaatattactacatgagattgcttaaagagtatttcttcttttgccttctt
tttactttcgttatttcatttagtagttagaaaatactgtctacaaatatgtgagaactgcttaattt
atttttgagacattaattaattcaactaaactatattgactgtgtgagagagattcccttggtgaata
tgtggatttttgcggtggtaagaactctcctctggagcgcaaatggtattgctctaggaataaagcat
atacctcaggcccagatgaaccagtgcaatctacagtaacaggttcaaagatgacctcatgacctact
gtggactaataaaaatcaaggagacctactgcaaaggtttctgggaaattctttttctcttgcgttga
actaagtaatatacatatgtgatagttagagctgcagcctttgtaataccatgacagaagataacctg
aaataaggctgacagacacaagagggagacctaagagtactgagagatatggagcaggaccccctgat
tgaacttcacttgcagcccccttctgcagttttcaatgacgtgaaccagtagaatccctttgtttact
gtttttgattaatttgagtgcagctttatgttatgagcaactaatagcatcctcactgtcacaactgc
cctctatacggcaggcactttgtgatactaaagaaagcagtatacagagtagagcccagtgaataaca
gggcagatgttgcaattaaactgcctgtttaaattctagctcttccactagctaacttgtgactatct
aagtaatttaaccttcctataatcatacctatcttgaagacttgttgtaagatttaaagcacaacagt
gctactataaaacaggtatacagtaaagcttagctacttttttattaggccatatgatatcatttcat
taaaatcttatagccatgctataaggtattatgatcctcaatttataaataagacagctcaagttttg
gtcaagtgactttaccaaggtcatagagctagaaaataatgattccaagttacaagccaaacctcttc
aatgccaaatttacatcatcccccattacttgaagtgtaagattcacatggacagaaatttttgactg
tttgatcactgctatctccttatcatctaaaacagtctctggtccatattaggtgttcaataaatatt
tgtagagtacataatttccttcacagactccacaatctggtgaaggaggcagacatgtaagagaatta
tttcaggattccacagttgatgctgtaacagagctaaatataatgaatggaggaggaatgaataagtt
tgtctgggagcaatgctatggctattgaaataagtcttgctcatgctttgattgaaatggtggatata
gatcacacaacaaataacaattagataacagcttgttgggagaaagcgaggatcagtgtttgccataa
acatttctcatagctaatgtcaggtgtttgatttctcaacattttatatctttgactttgattttctc
tgtttttattttttaactccattctcaagaagtctgcacataagagtttcaacatctagcacttcata
actccgtcatctcctctcaggcttagagcaaattctgagacgtggatttatcgtcgagtgatttcttc
ctggcattttatctctgagaccaggatctggttgctaagcatgtagacatagaaatgcatttcttcat
tgaaccccataggttcaaactagtggataatgagcacaatgtcaatgtgattatttgtaatgggggaa
aggttaccggagaatattacacgaccatccacatagactaacattttcctcatgactaagtttactta
gcaaaacaaattaaaaacagaagtttgtttagcagcacagaattgaaggaagacaaccagatggttat
gaggaagattcatccaaactatgccagaactgaaagaaattaagttcattcagtacaagaattgtcta
gaataagagaatccattttgtgtcagcacttcccaagttcttgttaatgctaccttaagttcaattca
aaccaggcagcatttattacgtgttgtgctgggtcctaggaggaccgcgttttaagaacttactgtga
tcttctagatcaagtttttatttcaatatttctacctcatttctgattcttaggtgttccttatttcc
caatttatcccctgcagaaattgaggcaataagatgtctatcttattgcctatggtgttgattattta
tgttatattctgttttgtgaagtttgacctctacctaattaaattacattttcaattgtatcttggat
tgatttattcaataagtattctttaatatttttgcatgaggtcggtcaggtttcatcagacattagga
attaattataaaaatctctagattggtacttggagcttaaaggaataaggtggtggaacgttaaatga
ggaggaaagaaccagcagagctgggataaaattcatctctatcatcttcccacctgcttgatctctgg
catataatttactatccgtgaacctcaggtttctcttcagaaaagctgcagggttgttgggggaaata
aggcaattcctgggcttcagtatgttcaaaacagagcattaatattattatagacttttgatgattta
cacaattttagctttttggcaagacatatttactagtactaagtaaaagcacgttgactttctaaaat
gaaaatgtgtatgtgaggatgaagaaaaagaaagtgttttgtttgataatatagcattataacactgc
acaaaaaaaaaatggtatatgcagagacttccatcacttgcttatgatgccgcattgggatctcatta
ataagacacttcctcagacacttcctttgtgttcaataaatttcaatttcctcctttccttcagttca
cttcaagaaggacggcagcaactttcttgttgccaaacctgacaaatgttttttagtgctgattatac
tcgagcattctgtagcaaaatgctgtgggtgaaaatgccttccttcttaagggaatttagcttctgta
gtaccagaatctccttgttgaatgaacatgtactgcctaagtcttagtaatccctcctttttgagccc
attttctggcatctctccctttaatattcctcaaaaagttggatttttcctggacttttcatattaca
gactttcctttggtcatcctcatccattccgtgattccaactacattttccctccatcctggcatctt
ctttcttccagacttgtatatgcaactgcttccattcatacacttgaccaaccttttaatttctataa
gatcaaaaactcagctcacaagctttcccctaccatcgagcggggttcttcttttgcttctttgtttc
agacaatggcaccaccatactcgagtaaggcacgttcatttatcaggtcctaccaaatctacaataaa
ctctcttgaatttatccacttgttttcatttgaacagtcatttctttacctgggtagcctgcaccttc
tacctgcattgattcagcagtctcttcaccactggctctccctccctctcctgcctctcttcttgctc
cttcaatttattctctactcttcatagtgacttttattaatgcaaatatgaccttataactcccttgc
ttaaagacccactcatgtttgtctttgtatccataacttccggcctagggcttaacgcatagcaggtg
ctcagtaaatctgtggtagatgaaagaacaagttgtataaatactgaatggtctgatgtgctctttgt
tgtgtcaagaaggacattttgcagtcaggatagctacatcagtcctttagtaggcatttgacagcact
cgcattattcctcaagagaagatggatgtattgattctgtatttcaaatgacataacttttgtgaaat
aagaggctgccacggtaatctgagggatctctcaagttcaagggactccacagtgctttgtgtaaggt
aacaggctaaagggttcagtcttaaactttcttaagactgtagttcagggttcctatggtggggctat
aaccctgaattacatcctctttcatttcatgctgataatgagaactacaaaccaaggggtattaggaa
agaatccaggtttgatgcagggaaaaataaaaacaactgataatctctagtgtccccaacttcaagaa
ttcctttcttctttacaccaagctttttttctctgccaggacttactttgtcttctacatgtttaagg
gagaaaaatgagttaacagaaggggaggtacagcatttctatttacttagatgctagagaacaggatg
aaaggtatgaaaaatatgaaagtctctctctctctctctccccagccttcccccgcttctctctctct
ctctctctctctgtgtgtgtgtgtgtgtgtgcacgtgcgtgtgtgtgtgtgtcataatactcaacctt
tcttttctttcaagcatatgttgtggcagagacaagtgtacatcaaaattcgtggtccctctttcata
gtatagagttcttgctaggatccagctgcaagccagcaactacatttcccagccccactggcatctag
ttagagccatgtgactagttgtgaccaattgaatgtgagtgggagttatgttgcaggcataccttttc
catcttcttacttcccatttgctaaccttatggaaaagagtcccaaagacctaggagatgaaaaagcc
taaaatggaaggactcagagtccctgaattactgggtagagaaaagctgtttgcagatgggaatgccc
attttgtagtattctttcttttcttaagccactaaaattgtgggatctctttgttatagctactggca
ttaacctcttacgtatacatacagctatgtgctacaaagaggaatagatacattttttaatcgttgaa
aggggagaaagaaacatatttaggaggaaaataatttagtctctacaattgaaaagtgttttatgaat
aatattttgttttggcagcatattaaatctcaggcagctgaactacattaattttcaattctctatat
atgtttttgtcttcagggtttagtaacactgatatataacagtttctttcttttaatttccaaattta
aatgtctaagtttgccttctaggcagaaattaagtcccattgtggaatgagattggatcaacacttca
ccaagatcattttagttctttgtaatcttaaatgaaataagctaataaagcattaaattagcatgttg
taaaacttcgtgaagttttaatatgcttctaagtggcagctcttagcttattatctctaaagctaaag
tcaaaataaatgtctcagttgatgaaatggagatgaggcaacattttatcaaatttaacaaaatattt
tatatctgaattataaagtccagattatctagtaattatcatataaatgtatttaaccagacatgcat
ttttctctaatcagtagccctggagtctttggaccacaaatgtgccttatctcaaatgctttaactgt
gacattttgctttagactagctcgactacttctacagaaattatacacttcattcacattcatccaga
tgaaaaaaatacatgtagaaatgatcataataagtaacatttgtttaggatttcagagtttacgaagg
gtttttctattcactttctcacttgttcttcatgtaaactggtttggtggacaactgtcattatccct
gttacctggagcccctgggtcttagggagacttcttgacttctcaaggtcatgaaggtgctaactctg
accgtgtttttattcctactgtgccacacttctcaggtaaaaatcatattgcagacactttaagagaa
gtacttaagaaaataaattcctccagagaattacatttaagttgtttcattaactgcagtgcataaag
aaaggaaaagtgttcccaaacccatgtagtattttgctattgcttatggtaatattctgcacacctaa
tattgtcagcataattttccatgtaacaaaatgtcctaaatcagcaatgtccaatataactttgtgtg
atgataaaaatgttctgtctctgtgctgtccaatacaacagccactagatacacatgactactgagca
atggtaatatggccagggacactaaggaactaaatttttatttaatattaaataacgtttaaatttca
aaagccgcatgcggctagtggttgtcatcagatactgcagttatagaaaattagaatttacctcttta
aatactaaacctatttttaatagtaggatttttaaattaaaatagttctaagtgcttttaagtgatac
gaagtcaaatgcaagatttctgttttaatagtactctcaacccagagacaatcttcatgcatccttat
acatgttctttgttgccttattctagttttattttaacattaaatgcctctgttctacttgatattga
cttgcttcagagaacaccaagtatagtggaaagaaacacacacatgaggacttgaggctaccaaccag
gttcaactaaatgcactctgatttaattgtagtattgggatcccctgttgcatttattgaagaagaaa
aaaactttgcaaccaaaaagatatttgaaagcaactgttcttcttggacacatgatccctcataaagt
ggggcttcctgcttttcagagacttaatttctgttcatattcatttcagcaatagtaataatgatgat
ggcgatgatgataataatcatgatgatgcctaagtgttgtagtaatgcttcttctgagccagacgtta
gtcaaattactttctctacattaattcaggcaatcatcacaacaatcccacaggacaggttttattat
tatacttatttagctagcaaatgatataactaggttaagttacttgcccaaggtcatactgccaagac
agtggctctagtgtccctgcttctgaccatatgttatgctgcctatcctagagcttttctcttctaaa
atagtaaaataatatattctttgtttgtttcatacttttttttttttttttttttttgagagggagtt
tcgctctttcgcccaggctggagtgaggtggcgcaatctcagctgactgtaacctctgcccccaccag
gttcgagtgattcccctgcctcagcctccgaagtacctgggataataggtgcccaccaccatgcctgg
ctaatttttgtgttttcagtagagacagggcttcaccatgttgaccaggctggtctcgagttcctcag
ctctggcagtccgcccgccttggcctcccacagtgctgggattacatgcatgagccactacacccggc
ccatacataaatattttaagcgaagtacacatgcatgatcatcatacttttaataatttcatttaact
gtttccaaagaatgttagtatgaggttttctttttttctttttataatttcaacttttattttagatt
cagcgggtacatgttccctggatatagtgcatgatgatgaggtttgctatatgaatgatcccaccacc
caggtagcgagcatggtaaccactagttcttcaacccttgcctgttcccttcctccctccttcctctg
tagtccccagtgtctattgttcctgtctttatgtccatgtgcactcaatgtttagctcccacttttaa
gcgagaacatgcagtactcgttgtctgttcctgcgttaacgtgcttaggatagtggcctccaattgca
tccatgttgttgcacaggccatgattttgttagtttttatggctgtgtagtattccatggtgtatacg
cgccacattctttatcctgtccaccattaatgggcacctaggttgattgcatgtctttgccattgtga
atagtgctgtgatgttatatgtactttttggtatattcaaagagaaatgctattttcctcttgacata
tttatgtcaatttaacatatttatgtcccttttctttttaggagcaccattctcttcctttaacatta
taaataaaatattttttgcttttctgtttttgtaagtgcagttttattgacagagtgagacatacacg
tcgatattgtgactagctgcatgtcttctattatttagaggtctcactcaaatgtagattatcaaatt
ctgttagtgaagagggtagaacagcagaactaatgctggtttccttctctagcattatttgatgataa
actaagatgataataccccccaggtcttagatacctgcagtaggacaggcaccctacatttaatgctc
ctaggaatccttcaaagtgatagcatagttattatacagtaattgagaaaactgatgttcataagtta
gaaatttttccgaagttgcaaagaaagtgaatggaagaattataccaagttctggccgggcgcagtag
ctcatgcctgtaatctcagcgcttcaggaggccgaggcgggcggatcatgaggtcaagagattgagac
catcctggccaacatggtgagaccccgtctttactaaaaatagtaaaattagctgggcgtggtggcac
gcacctgtaatctcagctactcgggaggctgaggtaggagaatcacttgaacccgggaggcggagttt
gcagtgagccgagatcgtgccattgcactccagcctgggcgacaagagcaaaactccgtctcagaaga
aaaaaaaaaaaaaaaaaagaggattataccgagttctctttgattccaagcccaaacaaatccttttt
tgcaatatatgacattgtttccctgtttgcattccccattctgtgtatcacacatcctgtggcctgat
caaaattcattttcagattctgaatttattttccattgaatctatataaactataaagacagaagata
tatgtatgtgtgtatacccacgtttctcttccagtgtcaactgataaaaatagatttcaaagtctcaa
taacctttaattccctttttctcttaaaaattctttagaacttgtacatgacattctgactctagcag
attttagaaaacagagaggccattagatattcataccttactattcagatgaagtattcaatgctaaa
ttatgtaatttatctgctttgcaaattgtatggtcagattgagttccacaaaggagagataattttta
atataggcattctgtagcttccctaattattgaattagtttagagcaaaatccttaaattgtatcgtt
gctatgctcaaattttgtatacttgtccacgtaggctatattaagatttcattgaattttggtttctt
tctcagtgataattcaatatatcaactcaccactcagatttgcctttgggaaaatccaggcccctttt
ctggatttttagagcagattttaaaaaagtgattctgtatatgtgttgaaattaaccacatctcattg
cttttgaatgattgaggtaatgtatacctactactttaaaaaaaatgacttacttagaaggtgtccat
agttttataagttccattgaactggtttatattgtatttagaaaggaaaactactccttttatcctta
agggtgaaaacctggattttattatacaattaacacatatttattttttattatgaaatatatcacaa
tataaacgtttacagggagtgtttaaagtggtgttgtccaatggaaatataatgtgagtcaaatacgt
agttttcaattttctactagccatattagaaaaagaaacagagaaattaatgtaataggatactttat
ttagcctagtatatccaaatcacaattatttaaatatgtaatcaatataaaaattactaattatgtat
ttaacctttttctttagtaagtctctgaaatctagtgtatattttacatttatggcacattgcaattt
gcattagtcacatttgaattgttcaatagccacaggtggctaatggctaccgtgttggacagcacagg
tttaaagaataatatgaacatctgtgttccaacattctgagtttcaaataagaagaacaccatcagta
ttttgggagaagctccctatgttaccccttgctaatcaccttccttccccccagagccaaaagtaacc
attatcttgaatttctagtaaacaatgctcattttttaaaaaacgtatgttcaacacctgtatttgta
tctttaaagagtagctagttttagtttgcctggatttgaactttatattaagggaaccaccccatctc
taatcttctctgtgaattcttttctctcaatactatgttttacatatttacgttcatcaatgtgcaac
tcattgtatgtatataacacaatgtatatattttacatgcgtatggacatttgggttgtttttatgtt
tttgttcatcacaaaccacaacacacatgtgttcttgtatatgttttatagtgcatgtttaaaaattt
ctcaacagtattcgctagtagtattgtcaggtcatagggtatgcacacataaatagaaatgattgatt
agctgcaatttgtagtgcacacatatttgctatgtaagtgatccatgtttaagactttaactgaattt
aaaaaatattttattggagccaatctaaatgagctaagggtttgtattgtttacataagcaaagatta
cacttactgggtcaattcggttgattaactttggatatataaaatatatagctagttgttaaatagat
ataattattaattggcattacttttgtttgtatataaaaatttcaaaatatccatgacttaagcaagg
taaacacccactgggtggcttaagcaacagaaatgtatttcttgcagttccggaagttgaacgtctaa
gattaaggtgatgacagggttggtttctggtgagtcctcccccattggcttgcagatagccgccttct
ccttcatgacctttcctctgtgtatgtgcatcccttgtagctgttcttccttttatgaggacattaga
cttattggattaaggtcctacccatatgaactcatttaaccttaattacccctttaaaggccctacct
ccacttgcaggggttaaaacttcaacatatgaatggggttgaggagacctacttcagtccataacagt
ttctatattctgaagatggtctttaattaactaaacagttaatgttactttactgggaatgtcttttg
gatgggggaataagctgatgatatgagaagggttggtgaatttctcataagtgtgaaatttgttgggc
cggcccagcatgattttcaatcaaatacgctttggggacaagtaggttgaatcactacgagaggttta
aaagaaagcaagttgtaattgcaacttttaattgaaagaaagacaggctttgttgatgtgccagcaag
actgataactggctttaacgtagatagtaaggcagcagattcaatccactgatcgtgatctactagtg
aatttcaaagccttatgcaatagaactacaaaccctttccttgcccaccttgcaggtggatccatagg
caaaatgaacatttgcaaaaaagccgctatgtttcagaatttgtgctagggctttaatatctataatt
tctccaaatcctcacaatttaagaattaattcaacttagccccatgaatagggtgaaaattctgagat
ttaacaaactaaaataagttatctgaagacagacaaatagaaagagttgagatattctatttgaatgt
aaaattttcaaaaagtagaatgacagcgtcaggaattacagtctcagtgttgaacacaagacttagga
acaaatttgctgcatgtaatttcattgagatgggacaaagtacagcatacgtaaggaagttttagaac
aaataagataattattttacgagctttgaaacatgtgtaagaaagatacgaataaaagtataatcaca
tttgactaaaacatgaataccttaaaactgaaaagcactgagattatcattatataattttgaatatt
ttaaaccacaatgctttgggagtgcactgtaatattttagaattggaattttaacttactggcttaaa
aagtaatgtactttgttttaaattcaaagattatcttgtaaattcagttcgatctattgaaaaaatta
taaaattcggcaagaagccaaagaagaacaattatgtagctcaagataattaaattttcatgtttggc
tttagaaatatattcgtcgtgacatagtacatggtaatctagtgagcccagacaagtagttttctctt
tttgtcaaagggaacaatttgatgcgtgttcaagttgcttaaataaaattttgtatgtgctttctcat
cacaagagaacaatatgatttttgaaattatttttactttataaaagaaaaaaaaaagccctcacaga
gaaaaaagaaaaaaatgatgatgtctttgaaaaacaaagttaatacagctttacatatatttgaccta
catcagggttaatatttttcaaggtgaaacattagatgctggaacttgcaaaaacaggcaatcctcct
ttagatgaaacggacactctaagggttaattcattcactgagacctattgtgaagtaagccctacaga
gactgaaaaagttaaatgcaactcacaaaagttgctagaagagtcatgatgttaaaataaaataagta
cacaatgtatgctgcaagtatacttagagccatgctaggtgcggttgagaagttcaatacaggtccaa
gataatagctgcttctcctatagaacatgtcttctcattggagggataagacctgtgtctatgaaaca
ggcgtaattacatagctctggaactatatatgccgaaataaatgagacagtaagtgttattgtactat
aaagaatgaagaaatcatgatgagaagtaacagttaatgaatgttttctagaaagagtaggatctgaa
ttggccttaggttgtaagcagagtttatagatagagtagtggtatgtcagagtcactctgggtgctta
aacatacaaatccccaagtctcacccaaatgtgtcttcagatgaaaggaaaaaacaaatgacttgagc
tcccccgcaaagaacacgggtggtatattgagcagccaaggagtgaccagagtggcaggcccatgttg
agggacaaaagaggacaattagaatatgattaatacaaatttacagtgggatgagttgttagcctgag
gagcttgaatgtgaacctctgtgcaaaaaggagtcattaaatacttttgaaaaaggtgggatgggaag
aaaatgacattctcaagacaattagatcgaacagtattaagcatgctgacttattaagttatgcacct
tgagagggtggaatgagggaaaagggtctttatctggagtaagacaggaagaagctaagctgtaattc
ttactggactgtaaattatgtgcagatatattatctgtcatgttcgtgggcgcattctcagtacatag
cacttgaaacaggtactcgataaattgtcaaatggatgcatggagtgatttccatgcaaaatctaata
ttgtatagtattagaagggggaaaaaagcatggcattatgctagcagaaatgtcatttggtattgagg
atgaaacattttcaacagtttgcaaagccatccactcaaacattctgtcactttccaataattttgaa
ggatgttctttctactictaccttattacacaatgagttgagtaagataaagaagtcatgtgcaacaa
aacagagggagattttctgaaaggcactacaccaggaagttgttgtactcttgcttcatcttgccatc
ttggatatacttctggcgctacctccaggccagttcctcgttacatatgtcatttacttcccacatgc
tagactcaccgagttaatcattttgctgcagttaacacattttagcagagtgtaggtttatgggtgag
aaggaaatcaatgatgtttcaatacagggttcttttcccatcccccttatttccacttagaactgtct
ctcaagtcttaatttgcctctaaacttttttcccagcttacattcttttctgaaaaatgcaacgacga
tgccaatgtttgttgacctgaaatacattgtaaaacattcataatactttgagcagagcttccaaact
cccatttgcctcttttatctcccttaccttggcccctttttgaaggcaatgtgatatttaatccgttt
ctattgatgcttcaaaattattgaaaaactggtaattgtatttttccctttacttatcagttgctagt
tgacaatgagtgtttgcccaaacaataaccaatcaaaaggtaaaaaggagattccagacatatctgag
aagaaattctttggaagaagcccgtaaatggaatgggaattcaaacaaagccgtttccaaaagaaata
ctaaatggtctctaaatgcaaaaggattgctccccaagcattttatgggagcataaaaagctcccaac
acattttatgacaatacttctactcaatgacttcttgtgttgacatatttgttgcactcgacgttagt
atttacagcttcttatcccaaatatttacttaactgaagccctgatgtttttaaaaacttttcatctg
tgtttaacagcccattttacagaaacttatttgtttcatcaggcagatatttactgagaacttgcaag
tgccatatattctaaaaatgctgatgataaaactgtgaacacaatagattctcatggtgcttatggtc
agggctagcacacacacttgtgaaatgatcactgatgatcaaaggcataaacactacatttggaagaa
ataccgagggatccagaagtatcttggaaacactagcaagtatagcagatggtgggattggtgcttca
aagaacttcttgtggaagatgttacgtatgtaccttctctgtgccaggcactgctaggaagtgctgga
gagaaaaagatgtgctagataccgcctctgtcctatgtgcttgtgctttgtggggaggtgagtaggat
aatcccagttctcatgcagtgtaatgagtaccatgacggaaatgcactccaagaactaggcagcatga
ccagagataggacatttgagaaagacttcactcgggtggtactatcttagtctgggtgctaaaataga
tgtgatagatgagtaagggtgacccggaagcaggagggaaagggaggggctttcagaacaacaagtgc
gaggacattaaggtgaaatagagtataatagtattcccagatccttgggattgttctccattaggcta
aaacaaaggtgttttctcttctttaagatttcatgactgcagattgcataacagaaggtcatttaata
gacctctaaactgaaggaattcttgaattaaatcacaacatatcttccatggccagagaaaccattgc
ctccttatgtcgacattactaacagcaccagcacctgctgctcaggccagcgggagggttgggtgttg
ctgcctaggtaatgctcaccaactgatgtcctgccatgagtagttttgccaagttccacaaaaaaaac
ttagtgttctatcagcatctaatgagaattacagtcattagttaaataaaagaactattagataagga
gcagaatgaacaacacacaatccatcagcttggtgaatggtatcagatggtttctgggtgctgggcag
ctgtgcatccaagtagacagggagaatatatatgtcctttgccttatgtacttgtttctctaatccaa
aggcacagcaatccgtggaagctgctatgataaggtgtttagtggtgaaaatgtcttgaaagccagta
gattattaaagtgatgtttttaaaaatgcagatggagagtaagtactttttatctagagtagtagttc
tcaaagggaggtcccgggatcagcagcgttagcatcacttgggaacttagacctgcatgggccccatt
ccagatctcacttgaaaactctagggggtgtagcccggcagtctttgttgtgaccagctctccagggg
gttctgacactccaaatgttcaagtttcagaacgctactcacaggccatcatgctcggcatcacctga
aagcttgttagaactagaaagtcttggccccaccccaagcctactaaatcagagtttttgggagtagg
gccaagaaaactgtgggttaacaaggtctccaagtgattcttattcatgtcaaaatttgaaaagcgtc
gatcgaactgttggttctcagctttgattgcgtatctgaatcacctggggagacagttgagctattcc
gggcccagatcacatctagaccaattgaatcagaatctatggaggcaggacccagacatcagtatttt
aaaatatttcttgaatgatcccagagtgtagctaaggttgagaaacactgttctaggattaaaggatt
aatgtgtttgagagtatgttaagatcttaggcaaatcacaagggtgttaagaactaccatcttcgcaa
aaggagaatgtgcctcagatattctggtactgctttgattttaccttcagtagtcttacctattttga
gtatgcttagtagtactaatatgaggcttattactaatatgttaaaatttgtcttttaattaagtggg
tctaaacgttttaatctttaatctctgacccaactagaacttttctaaacattttcataatagtctcc
accttgtcttctgaccttcacttatgttctttcagggttcttcgtgtgttactagtaatagtaatggc
aagtgtttattgaacacttactatgtgaagattctaactggcttttaataatcacatcagctctggga
ggtagaaggtagggatcctccttgcttatcaggtgagaaaactgtactatagagaagttagcaacttt
tcccaggtcataatatgtgacagctaaagggagcataatggttggaataaaataaatctactctagtt
gtaccgaaggctcatatttgtctcacgtacttgatttggtcgaggcccaaggggtcaatttccaatgc
ttggattcctggatatgtagagttgtattaaaaatgctaaaaacctattatgtatcatacaatcatac
atatcacctaaagtattatggaaatgaatctgtattattaagggaaaaaggcctgtgtgaagaacaac
tgaaacttcattttaattgaaattaaataacatgcatcatacactaaaagtgcacgttatgaccccat
gaattacttcaggtggctttgattcatgttacatacactaacaaatatagaagagtgatataatgctt
cttaattaactactaatggaagtttactatttaactgcttcttatgtaagaatgtaaatgttttctga
aatatcagaacttttcattaggaagcacttttaaaaatagcaaaactgatatgcactatgatttccat
atacattaaattgaacttgtaaatgatgttataaattatagaaaccaaggggatgttcaaattagata
tttgtctaaataaatcatgtatggattgaacaaatactcattgagaaataaatgtattccttttcttt
caattatctaggattccttgtttatctcttcagaagcaaaatgtcttctgtccgttttatttccagtt
aaacattcttcagattatgtaaataagttaacttccaatcctcttatttctgtttatctcaccactct
tctaatttagacgtgatcaatatcttatctttttgcatttcatagacatcaggatccagaataattga
gtgagctcaaaacaacaatggcaagaatgatgttttcagaaaactcagcaatcattcgtttaataaat
attcattgcctaccaactataagcaaagtattggctaggccatgtggggtatacaaaaatgtattaaa
tatggctcattctccctaagaacttacacctattagacaaagtacatgcataaaaattataatgtata
atagaaaataaatacaagccctagaatgcacagttgaagtacgatttgcatttattataaaaagaaag
atgaattggctgggcacggtggctcacgcctgtaatcccagcactttgggaggccaaggtgggcagat
cacgaggtcaggagttcgagaccatcctggccaacatggtgaaactctatctctactaaatatacaaa
aattagccgggtttggtggtatgcacctgtaatcccagctacttagcaggctgaggcaggagaattgt
ttgaacctgggaggtggaggttgcagtgagccaagatctggccattgcactccagcctgggcaacagc
aagattccatctcaaaaaaaaaaaaaggaaagaaaagaaaagattaatttcctgttagctaaatcaag
gaaggcttcatggagaaaaaaatatttcaacacacacttgacgtagcagtgggatcaggctgatgtta
gggaagaatgaatgacattctacactgagaaagagatattcagtatatatatgaagagcagtagagaa
actaacaagtggaaatagactcaatttacaatacttgcctgcctggagtactctatacgttgactgta
agttgcagtttactcagaacaatcccactttctacttgtttatcctatgtaatcatttattgggcctc
cttttgctctcaaaaatatccttgtttggataatagattatcactctgttcctaaatgaactgccctg
tgtcctatcccagtaaaagggtgcattcgggcccttcgtaactgcctccactacatggttgattgaaa
ccagagcttggcattaagaagttagctgaacaatcagatttctattcttggaaaacccaagaatttca
gaatagatacagaagctgtatagctttaataacatgacagagttgtagccttgaaagctatgtacaat
tcagaattatgagggagaagaaattgaagaaacagtagcagccgggtaaatgcagaaacaaatgaggg
agacacctagggggtgactgaggcacaataatggaagagaagtgcagtgaaattgcttgaactcttac
tgatgagatttctactgttgccttgaatccaggaccacctatatgttcattctttgtcatgctcagag
ttatgacagatgctgttattgaattccccagagactcccttatcgtctcacctcaaaccttacaataa
tcccttctatctttctatccatccaagctggcttaagtaaagtctatgatccatattcctagtaaaca
gagaagggaaagagactgaaggcaaaggccccaattagtaggctattgcaatatttcagggaaaaggc
aatggccatcacattgttgtcccaggaatgagaatagaaatgaaagaagataatgaaagttgaaagga
ctgggggggcttgacaactgtttagacttgaggagtcagataaaataggaagccaaagataattcaga
atattttgattttgattttcatcaccaaataagatagtagtactatgaagaaaaaatggttaaaaaac
aataataataaagagaactcctccaaatagtaccaagggagggagtttaatagaggaaattaattccg
taggtgatgagagtcctgagaagccaaacgagaaaagatcaaaacaacccagggattggcagtcgcag
gaagctgttctcacttatggctggggctttaagcacaaggtgacatgagatttcagaatttgaagtcg
tctggaggcagctaggatcaggtggggcctgtcctgttcggcaggacctgcaaccacaggaggaggat
gcgtcaagcagaaagttggaacacaagaggggattcagccataagccacaaaataccttccagagcag
agagaaggagaaataccctgaattccgtattttccctgccatttagttccctgctattgccacacatt
gacgtattccatccagagaagtccattggcatatgagtctgggaaatgtagttcccagggggacatga
tcttaagggaaatagacaatgactggtgcaacaactgacctgtgtgaggcaggagggaaaaaacagga
ataatatagtttttctctagatcccttcatgcacaaagatgcaaaagaaatgtgttggcttaatgagc
cattctgggtggccctgtaggtggctgtcctacgaataagatttttagacaaaacagagatgacttca
aatgtcacaagaaaagtatcagacaggaattaatattgacttgatctgtcacaggcgtcaatgatttg
cattaagccaacgatcttcattgttaatgtctgggaaattgccagcagcattacgactacttgtgtgg
attagtgtaacggattcccccactaacattcaggaaatcatgtcaagcacagagtgcctatgtaagag
tggttgtgtctattcactacatttcttggactaataacacacttagccttcctgaattgccaacatgt
acaaaaccagattggggttttttagttgttcatggaactatcatttattgggtagctcctgtagaagc
aagatacagaaactctaattaggaataagacagtccctgtacttcaaagagctctcaggggaggcaca
caagtaaacaagcaattattatcatacgttaggataataccgtcatggtgataaccactgagtgatag
ccaaacacatggaagaggtacccaagtctaacttggggtagtcagagactgctttcaaggatatccga
gtaagtgttagctaagacatgatacgtatttctaggagggaaattttcaaggcaaggtggagattgtg
cagtgacgcccagagcctggattattttggtgactgctagtatttcagaatgacttcagcaaaagttg
tagagaagatagaagacaacaaagtataagcagaggccagataatgaggacctggaacagtggtttgc
tggtaaatgtttaacaagaggctcttggcggggagagagagtgtctgatttgcagcatttggcaaatt
ttgttgcacaaatgctccagcatagccaatttcaagctaccagtgtgacgtcattgaatgcagaattg
gaaagaaacgggcagtagcacagcattgtatagttattttcattacccagatataatagataaaatat
ccagatggtatttaatagatatggatgcaaaatttaaatatatgtacattcatgtgcttcatgttact
gaatgcgcacaacattcattatccattcattcacgtgttaatttaacaaacatttctgagcctctgct
ctgtgccaaacgcagttctagctgctggaattacagcactgaaaaaaaaaatttgtcctcactgaggt
aagacaaacattattatgcccattttacagctgagaaattaagacatatgaggattaagcagtatagt
taaaatcacacaattggtacatgaaggaatcaaagaggaaatcagctctcagattttaaatccaggga
ctcgtttctgctataccatactacctacctagttgagctggattttatcatggtttccctatttttat
caccatgtggttggataagtaaaataaatatatgtgacctttcaaataaatttgggtcatttttcttg
gaagctcatctggtgtgaactttaaaatactgcaattaataatgattataataccctggaactctgta
gcaacctcttttgaagaactccaaggagcctctaaatgtatcaaactaagttcttcaagtgaattagt
tatcatctgagagtaatatagacttttaaaaatgcattaattgtattaaccctttcaggcccatagac
ttaagtgtttctttctccaaataaaaatagtaatctctgtccattttctttagagaataatgaagtaa
ttttcattgaatatgtagtcaacataattacttcaattcaatcgtgaaggattttaaaaattatttat
gtctactaacttaaagacatgcatagatttcaagaacttaaaaatgcatattgcctctttgccctatg
cctcataaaacaaaattatgataacgttgtgtgttacagaaaaacgcactgattgtaatgaagggtgc
ttcaaaggccatgaacttggaaagcaacttatttacagagacccccagcaatagcagctaaaagattg
actgactccctttattttcagttatccttcagacacttttgacctcttcctgtgcctttctagtcatg
tgcaatcttgtggatatctcttccttcctcttgttattttctatttcctctgtttctatttgtttcta
aaaataatcatgtttgaatataggattagcttccttcccatctccccattaccaatctctcactatac
cgctatgttattaatcttcctgagaaatatatcaggttcattacattagttaccagctcaaaacgtat
cagtggctttctagtcctcacaggctcaagttaatctgcatattctgactttcatattctgggttcat
gcaaacttttcaactttccctcttatacctacttaggaggaccctcaggttccatcatgctcatgttt
caagccagaagttctcctgcctcttcctctatgtagactccacatagactatgatatcctgcttctct
tttaatcctccatcttcagctcacagccacactcctctgtgaacagttaaatgattctcccacctctt
acctcctatagcacttatttttcatgcagcatttttgagacttaattaaatctacagttttaaaaaat
gtttttctaccacagtctcttattcatactaaaactttcaagtctatccattttgcttatacaaccac
accgttaggtcttttaggtccaagaatacaagagaatggcaaagcacgttgtttacatccacacatac
tgtgtaaattcaggtaattttttttaatcctatgatcctcaattacctcacctgtaaaataggtacta
ctcatactgcagaactcttgttggaattaaataaatgagtgtattaaaaatgctcaacaagatttggc
acaaaatcggtactcagtaaatgctaatcattattccctttctcttcaaagctccacaattctgtatt
catatcaccctctttatatcatttgcaaaaatgtatcctattccaactctttccacctagcctcaaca
tttacaaacactcctggtgggaagggaaagcttttgaggagagcacatctatactcatttacttctca
gggatgcaagctgccctgcttactgagggcatatcttcatagtcacaccggagcccactgtcccctta
tactctcaaatgggcagtagcaaatcatcttgatcggtagtaatgacctgtctctaaattttcacatg
catcagataatttcttttttagtaagtgttatcttacatatatgccaaaatatcaccattatatggaa
cactagctgaaagaaaaattattcagtagtcttaattttctagctaacataaattctctccattttca
tcatccatttagattaaagactttactgttagctgaatattcagagactttattctgatttttaaaat
ttatgaggttcataatgttaagacttcaagggtgagctgtttgtgtcatttataatgcgtgactagac
agtaactagaaaatggattgttgactttacaagatttctccccaccacgtccccccaaacctgtgctg
ctgtgtatttggcctgaaatctttacttctagtcaatctttggacctaaagcctaccagcttttagca
tcctttaagattgacgtgtctctgggagaccaatagatgctaaaccaaatttcgtatgcacttggcaa
tataggataataacaaccatactccctgcaattgtttcctaacacagatgtaacaaattaccacaagc
tgggtggcttaatagacatttattctctcacaaatctggaagctaggtgtccaaaatcaaggtcaatt
atccctctgaaggctctggggaagaattcttccttgcctcttccagcttctggtagccccaggtgttc
cttgatttcaagcagcacaagttcaacatctgctcctgacctcacataaccctcttctttgtgtgtct
ttctgtgtccactcttttctttattattattattattattattattattattattatactttaagttt
tagggtacatgtgcacaatgtgcaggttagttacatatgtatgcatgtgccatgctggtgtgctgcac
ccattagctcatcatttagcattaggtatatctcctaatgctatccctccccccctccccccacccca
caacagtccccagagtgtgatgttcccattcctgtgtccatgtgttctcattgttcaattcccacctg
tgagtgagagtatgcagtgtttggttttttgttcttgcgatagtttactgagaatgatgatttccaat
ttcatccatgtctctacaaagaacatgaactcatcatttttttatggctgcatagtattccatggtgt
atatgtgccacattttcttaatccagtctatcattgttggacatttgggttggttccaagtctttgct
attgtgaatagtgccgcaaaaggacaccagtctttggatttagagcccaccctaaattcatggtgatg
tcattttgaaattcttaactaattacatcttcaaagaccctatttccaaatctggtgacattcaaggt
ttcagggacatgtgactattcaggggaaactattcatcccaccacatcccccttgaaaattctggaaa
atgtagtaataaaggcttctgataaattagtgtggaaagtattcacggttataaattactaaaaagtc
tcactgtgagctcttaatcaaaaggccctataaaacatttatttgcttgattaaaactacacatccga
tattttggttttggatttattattatttttagacttggaataactattttatgtgaaatagattccat
aactgaagcagcatacctctcaatttcccaacatttattttattattttttgtcttcacactacttaa
taactgaggaaaaatcatttagaccaaagttcaccttggttgacaccatccagacagctacaggaaat
aacaatggaaactaaatctctaagaaaaagagtctttcatgtgaaatattgcagagttgattctagat
atatagctgttggaagaatggatactattacatagatatggcagagtggtatccagcacctttcaaca
aagatctttcagagtcagtcttattatgtctggagaatttacccagggcttaggtgcttttactgaca
atctaaccacctgcaccccacccaccgtctaaagctaaagtttattggaagacttaggaaatcagtct
tcggaatgtttctgagactggtacacccaccacttcattaaagtgcttcacttcacttcattagacaa
gaagtaaaatacttgtcaggaaattatttatagtaccatgtatatgggtatcttatttaatactactt
aatgatggtactacaagttatataaaatggagaaataagtcatcaagtttgacaataatgatatttga
tattatcattatcttttttattcgttcccacagaagtactctgttattggtttagaaaaatgatattt
gatataataaagaaggaaaaggtggtaatattctttattttttgtatctttataccccagctctttca
ccaatctcccccatctctgtagttctcctctggtgtccccaggcagtgaactattcccagtggttagg
gaacatctcattgagtaagttacatcaacatttcttcacatttcaggacaacaggaacagtgccaaat
cctagcccattgttcaactctcaagccttattatcctaataacacatccatcccaagaaagaattcat
caagatcagagaggaatacgtataattttttatagtacagtatttaaaatgaaacagcttttggcccg
cgtggtctcagtgggctcaagggggaaattcaggatgctagctcatctcacaccaagtttaataaagg
gtgtcctataaaaagctaatttcttgctggtaaattgctttttaagtaatccttgctgttgcaagaga
cccattcatagcgctgacactgggagccatgttggaaaggctagatatgctctgggagataaggtaag
atccaggtggaatcttctctttacagaatgacaatgtatatagctaatattgtcctttgaggctagtt
tgcatgcagttgctggtatggcactgctcagcagcctgctgcagataagaatgagtgatgatgcccta
gattttaatggaacttttagagtgcatgcagcagtggggtgcagtcttcagcaaagaaaaacgagctg
acttgcaggcatgagagatcatcaagaaagataaagaaataggacatccactctaggttaggcaaggc
tttttagaggatattatggaaatgagcaagaaccaatttaatttttataatgccactccatttaactt
taaaatacaaggtcaaggtactgtgtttttcataatgattaaagatttggagcactctttctgttgaa
acatactgcatctgtttggcagaaaaaaaaagtgacaaagaataaaactgggatcagagaacaacaaa
aacatattctgtcacttgcctaacacaagttaaaaagcaaaggaaaaagagacaactctgatggacat
gttcatccttatcccaacagaaggatttatttacctaaggtcctattatttcaagttactttgatccc
aggatggtaacataaaatgtacattttaaaataaaatggaagtataagatcaataaaaaccacatatc
tgtggataaaacagcagattcaatcttgtggctgaaagtttgctttaacccaacatttggtaaactat
tcactctgtaatttattaaaagacatactgttattataaaactatctcagtttgcatcttgttggttc
tgtcaaaatttcatcctgctaattctcaacttgtaatatctctgatatacatgattaatctattttag
gaataaaacaaaaactacctttatcttacgcatttctaggaagtgtttttagatgtaaagtaggggta
attgtagtatagtggaaaggattttgaacttgaagccagaacatatgtctctgccaaaaactaggtgt
gtgaccttaaataagttacttagcttcctgaatcttagtttgtttagcttttttctataaagtggcac
acctatccacatcacagttttgttgtcaaaattaaataaaatactatattagaaagaaacttttagaa
agaaatttataaactgaaatgtactatacaagtttaaatcattctcattattttcttaccctaaaatt
ttgaccttatttttcttagcaaatggctgaatctgtaaaatttaacccccacgcagcatctggattca
agagaactacggtcatttctttatacagaatactaattatacacatatagcaaaacacaagttttttc
caactactctgtgtttttaaagattcagtgtgggcagaaggaattttatcaactatgttaggggaaaa
aagtctgaagaaatgaaaataatgagaaaaagcactgttgatttaagtgcaggaacataaaacttcaa
ggcaaatgtgaggccaactgagttcatatatatcctcacaaaatgatttagttaatttaaaaactttt
ctaataagcaacacaggtaatcccaaattctatcttttatagctctaagagtccccataatttattca
gcaattatttaccacccacttattataagaaaagccctgggataagtcttgagaagaaactaacaaaa
acaaaacttgattgtttgctctcaaaaagctgggtctaaaataggcaaggtaagattttgttttgagg
agcccgtattttccagcactgtccattgtaacattaaaatagtttgccaaaatcctcactctgtgggt
gtatttgcctagggtgctaaaattgcttaaaaactttgttatttggctaactaaaatcactgaatagt
aaacagtagcattagagatggcagagacattaggtgtcatgcagttcaactgcttcacctagcagaca
aagacattaagttccatttcttaaatttaactatctggttgaggatacacagtagcagagctaaatca
agaacctcttggggttagagtttttgtttatgcattactttgttttggaattaaaaacagtgcctgtt
tgctaagttaaattgaaaatatgctctgaaggagaaaaacagctataaaaatagacttaacttccaaa
ctatggatcacaataaactaaagaaataatttctgtagcaataaactccaacactttccataggacca
gaaaggcttgagaaagaggagaacaaaaaaatgctttggggcttaccatatatatggagaaagctaaa
tgaataaaccagttgaaagacagcgagttatactagtaacaatattactgatatcggagctctcactt
ataaattgtatattatgatcatagtgactaggtactttatatctgctttctcattccttcctcacatt
aattcacatgtaggacagattacctcttctgtttctatccagaggcctagagctcaggccctcatcga
agacagacagagctatcatccttattctaaaaaaaaactaagaccccagacatagctgtgctacttat
agactagaatgtgagagaaaaagacaagctttcatcatgggcttaacaaactgaaacacttcttcaat
tttgagattgagaaacttagctaatgctaggtgtaaagatgatatgctaccttcataaccttggtgag
gagaaattagcatttctctcagtcctagaaggaggatgaccatgaaggtcttcattctcttgagaaga
taatcaaatgcttcactgccctgttaacggtttactcaatattcaccaagaaaagtagatgggattat
ttttgcagacacttatacgggtaatttattctgataagcagagacatacctttagtgcataaattgtt
ccctttgtgctctttgtaataaacatcaccatagagaacaaacacgaagtaatgacattgaattaaaa
gacaccatagaggcaacagcgactggaatttgtgaaagtaaaaggatagtgcaaacagttgtgcgttg
cattctgctctgaagattaacaagctgggtcaggctttgaccatcatgatgagcaggagatttttcta
atggaaatccccaatcaagttcctgctgcacccagaaaggaacggcttacagaaatcttacatttctt
tgcacataccaaattgcttggcatattctatcacaaggtttactttccagggaatgtgatcaagaaat
catgatcctaattcctagttaaccctcaaagtttctcagaacagtcagtgcatcactgtcaacttttg
tgcaatgtggaaatcagaattggtcacacgtttttccggccactgttttagattcatataatattagt
gaaatcatgtcagactggtatagccatgaatttatacttcatgaataggcactcaataaatagtggat
taaatcgaccgatttgatttttacctccaataatttcaaaaatatcattgaagacaaggttgttgaag
ctgtcacttttcttgctgaacctttgttgtgccaggaggaacagatggtaaaatcaaaagtgattaga
gaatcagtggggtgggggtgagattggaggggagaggtcttcccagtgagacccgctagcgtcttccc
tgagcagtatgttaacccaagacaattttagaaatctgtgcccctaagttgcttgacatccaaagcac
acttgatgcatcctacatttctaaatatttttattgttgtttctcggtagtaatcatctggtttagtc
actctaaaagtcaaggatgaaattttaaaatgcaaataaaagtgcctactttctctctttccaattcc
tttttgttttattgaggtataatttacatgcacaaaaaaatcgcctttttaaagtgtacagtttgatg
agttttgacaaacatatgcagtcctacaaccacgtccgtgatcagaataggaaatatttttatcactt
caaaaagtttccttgtactcccgttgcagtcagtctcctgccccaccccagcccctggaaaccactga
taggtaaaagcacttttaatctgaaaggtatttaatgtatggcagtgtcagtggtaataataacaaga
tttattcattggttcactgtatttttgagcacttatatgtgcccgttgtatgcaacccattatgctca
acccctgccctcctcaccagggataaactagtggcagagatagacaaagaagccgtctctctatcacc
cctatcttatagaacattcttcaatgttagaaatgcagtataatgtggccattgagaacttgaaatgt
gcttagtgggaatgaagaactgaagttttaactttatttaatttcaattaatttaaatttatatagcc
acatgtggctaatgactatcccactggaaagtacagcttctatacaatatgataatatgatacattat
aacgcaggagtttaaccaagtgctaaagctttactatcaccagggtcactggtgttatgtgaaaagaa
aacttacaatagaaaaataaatcctttaaatagtcacagacctgagaaagtttccttctcaagggaac
acacattggctcattcaaaggaggttaaaaactagcatttaaggtaatttcatgaagctttcctttgg
atttctcatgcttattgtatacataaataggcaattttcgatgggacctaataaatcactgtttttta
tttgaacattttaacaaaattatcaaacagcattgcatttatgttcaacctatttgttctgagaaaga
caacgattaagtagaagtcatcaaagttaccagaacaatttttgttcttatgttttagaaggcattga
aggtgtttaaaatgtacacttatagagtcagagtactatgcaactgtggcccttatagtttatccgtc
atgcatctaaagccattgttacatctgtttctaattgtgcatggattgtccaagatacacaattggaa
attccattttatttatcaatttgaagaggtttcacccatgtggtcactatgatcactatggagtcaca
ttaaattgagaagtctccagaagttgcagtatttatttaaaattctaactttcttcagaggaacaaat
tctccatttctggattctgaatcctcattagccataaggttgttgtaagaatttgcagctaataggaa
cacatcctggggagagaccagttgaaaagtaacttggttctgagtgaaattatacagagacagtttct
acttcaggtggtgttgctaatgaagctatcatggtaattttagcccatatgatccctaaacgacttca
gaaccacttttcatccactaagaacccacttcaaccactgccacgttcactaccacagtataatatgg
aacaccctctggaattcagtaagtaacttcttaactcattggctatagagctttgcctttgtaaattc
tttccttttgcagtaaaagagattgtttcaaagtaatccaattagtccctaggcatgtctagaaaggt
agagtcaacaacagtaaggtaatagtccttataagatatgtaagaaattatcagtcatttactttaaa
ataatttgtacacttttccttttatatggttcttctatgttgaagccagtggtcatccagtgattaag
attagccaaactcaaaaggctaaaactaaattcaaatggtattattttgctttaattttatgcaatgc
tatgtatttaaatttcatgaaagtttcgtatggcattgctatcaatttcagtcaggataaatttcccg
tgaaataatccacaattttcaactgtacgttgggtacaggtaaggaaacacccttaagagcttatcca
gttattagctggtattataaatttcaagtaattcaatgttcaattaataaacagttactttaaatggg
aaagtatgagtcaagagttagtacaaaggagaatcttaaaagatgaacatcaaagaatcttactattg
atttgttggtgcctttgcttgcacttctccaaattgacttgacgttttaaatttgtactgataatcat
cagagtcaaatctgcttttaggcaaaaagtatccgctagttattcccctactatgaaagtgatgagat
gaattgatcatgtctccagtgtatggatggatgtctttgaggaagacctactgaccttatgtttatct
tctgtcagcatggtgtgactatgtggagagacagtgctatttgctaaatactttgtttttcaaataaa
aagatttcacagattatgcattgtagaatttataagtattcttttatgtctttgaatgtgccaataca
atttttatgaagttggaactattttatctattttaatgaaattgtaagccttctgtgaattcttttat
taattttattctgaagaaaatctgaccaggttagggaaatcaggtcaggttacgacgtgatcccagtg
gaaaagctgaactgtggactgtgatttaaaatagggaagaggtactgaagtgttgtttttatttttgt
ttacaaatcagcctttctaactattatgtactcccatccttctatctttttctccaccagaacgtatt
aacaggcatgcatataattaatgcttttcttgagataatattaaaattaacttcatctgtcaggccgt
ctgggctaaaagtacacagtcagatctgggtaacatttgagttgatgtaaatatgcccacacatactg
acaatgcttaccatttattgtgtgaatgaaaagcagtgtaaatattgtttgttctactagggaagctc
cacattttaatcaaactttgaccgtatttctaaaatgccagagcatctggaattgttaaaggaactga
tagtttttgtgtttttaactgttaggatacttgaaatccaaagggtaaagaaactcagctgatttata
cgtttcttcctctttattttaatgtgataaaatgtagtttttgtcatgggctgacaaacagtggtaga
ctacactaactctgcgtttgctgggtttaatcttaccctctcaaggcatggaatgggagctcacttca
gacccagccatgcttcactgtccactgccttctcatggatatagtgtgaacattaattagatgaattc
cataaagtgctttaagctctttggagaaagatactcgctgcataattattcttaactcccatacgctc
ttatgatataaaccattctcccaggaaatcctttttagggattatcacttaaaatgaaattttcatta
ttaaaagcaggaagaatatacatctactgacagacgaaaatgtgcttaaggcgactgcttttaaatag
gcagaaatcctgaactatggagccatccatgcctgaaaatactgagtaataatgaaaactggtagcaa
atttggaatattaatcatcacattaagttgcaaagaaaaaaaaatacaagccacatgccctttaaaaa
tacgtgcacaaatctttattctagaaatatataactttaggcctaaaaaagtacaaaaagtaaattat
tttatggctctgaaagtatccttaatttactcaggtgacaacaattagtgtttaaagagttagttttc
aatcttagctacaagttggaattactctggaagctctaaaaaaacaaaaaacaaaaaaaaatagagat
gcctagttcccacctgcagaaattctgatttgatttttctggtgcgagacctgagaataggaattttt
ttaaagcttccctagtgattctagtgtgccacctaggttgccttaaggtaaacctcatattatgcaga
acctagcaatcacctatcctgattttatagacgaagatcataagacccaagagggcaaattgatttat
tcaagattgaatatacaaatgatagaagattcacataagatgcagtatacagagtggcttgtggattc
ttgccaatgcaggcagcagaattttctttagggttcacccagttcaggcacctctttgcagcagcact
tgactaaggttcttctgattggatcattatatgggcaaaaagaaaaagcttaattgaaaagagctgaa
cccacattgtggaatggaagatatacagtttacacgttataaatgattaatattcatgaaagcatact
gccctttcctcttcccttcccatagatgacatcattgcattggtgtagttaggttggtggtttcttgt
tgttgatcttggttctgacacagttcatcacttattatcctggcttattatctacttctacattcatt
gttcactcactcactaattaattcaacatggtttttattgttttggaccggttatatgcctgcaacgc
tacgtaaggctgaggatattacaatgaacaggaaacaaccctgaagtttaaggtatcaagcctttgag
ttactgtcttttatcatagctgatataaaattgaagccccactttttttgttttcaattactgaaaat
tcagtgctaaaaaaatgtggatttttattcaactagataaagtactacaattaggtttccactgacct
tggctgtttttgttcccagttgccattacataaatctgtgccactcacaacttaggaagggtgtaaca
ttctctgtaatagtttgcctttcgaatagtgtttggattcattactgtccctcgcagtttggaataat
gaccactgaataatcagtgtttggagactaaattagtgctgcaaaattccctcaaattacctactgtt
cttttccctgtcgatgtatcctcatattcactatgattaccctgagaagaaagatattgttgagaacc
actttacctactcgaagttttggtatttcaaagattcatacttatgtcatgttgattacattagcact
aatactattggcagaattctaattcacgttattttctttttttccaatttctctccatgcctatgtgt
tgtcccttcgcagctataaagccatggccgattcatgggtgcttttgttaaggcgttcagcagtcacg
tttgtagatttttgaatgggacttagagcccttttttgttctttatgtatttctctatttctcagcaa
aggaaatgcagacatgcaagaaatagtgatcaaatgtcctgtgtactattgtgggtgtcattaatggt
atagggagaaatagaaaatagttgcaaagatgcatttaacaaataaacgaggtcttgagattcaccat
gaatgtggccccttctatgaaaagtagttaacatccaactgcaaagttgtactggatcagtttgactt
taacctttagctaatatgaaaatatggaattgtgtggtggtgctcacaaaaaagaaaactcatttttc
ttaattatcatcaattaacatgtactgactacccatgagggaaagttaatttgctcttgagtggaacc
aagaaaaatagataaagcaatttctgattagccagtgaaagcctctaacataaaatttccaaagatgt
aagaaaaatagataaagcaatttctgattagccagtgaaagcctctaacataaaatttccaaagatgt
gccataaattatccacaaaatgtaaaacttttcaattttggtttgcattttcttttttcttattataa
aggtaataagtgctcattatagaatttgaaaaatataggaagttgcacggaagacgaataaaatcagc
cataatcctacaaacctattgacacttgtacatatgtttgttatctctaatgcattcattatgataat
gcatcttttcaaccaatagagtaatcactggtgactttcaaatttgcctactcatttttcactctgtg
gacttactttactacctcttgccctttttcagtaaatgaataaatatttaagtaagtaaatacaaatg
taataacttatgcgctcaagcacacagatacacacagagagaatttggaacttcggaaatgccatcct
ctccctagggccgcaagtgagttgataagcacgtaaggaaggataatcaggggagccttctcgtattg
cccagatggctcaaaattcgtcatctctaccaaacaactatttggagctttgaagaaatatccatgac
ccctttgaattcttcagtttctttcgcgttcactttgagaaccaagtgacaagtgaatttcctgactt
ggtcttttaaacctgttagcgcagttccattgagattttgtgggcacaagattgcaatgaagagatca
acagggagaaattcatttccctatatatgtgcgattaatccggagtgctaagggcagatataaagcag
gtgcctactcctgtataacttggaataaaaccatttccaaaggctgatgatcctcaagtcttgttctg
caaatgactgatgtataacttcaggccaatttttctccagttagtctgtgtcactgggagtcccattt
ctcggggagcagccccatgctttgtcaggtgcggagcccacagaaggttaatgcgaaaagaaggcctc
ttgccagactgttttccagatgatacgtagggttattagtttgagctccttaagaagatttttctcac
ctgtcctaccaacttatgtttatttcattggtgttagagggtttcagtggcggaagtaaaatatttag
cggggaagggacagcgttcatgggaattttgcctaacttaattttgtatctttagctcattcgtagtc
attgtactttgtgttttgtcaactgaattttgtttgcatacaaaggcacaaaatgtttgcttcagacc
tgtcactcttatttttagcatggttagacaaaaactgagatgctttaattgtctaacttatcccagtt
taagtgctgcaaaatctcccaggcaatgtcatgggcaactaagggataaaatcagagatttaaaggtg
ccaggtttcccacgcttctaacagttggcgttttgggtgtatacaatccctcagctttcttctttagt
ttatggagtcttgtggagggaatagcaggtttttagctaaaattatcatgctgtcgagttgggtctct
agtgcatcctgaagagcttgcattatttacagaggctgggctatcattttaaatcctgatgcttcaat
gcccgttatcattcttgacaaactcttccagcccgtggtctgttttcctctgtttgcttccatttact
ttcctgagcaaccagctgagcaaagatttacataacttttgtttaaacaaaccctgtacagttcactc
tttcagccagtatgtaaacacttttgagacacagttacatttttctattttagtcccagattctgttt
atttgctacattttttgtgcccacatttttgtctttgttaagtctcttacagattcacatgaaaaacc
agaaaccgtggctgctcaaaagtcattaataatgagatttttagctactgtttctgcttgtaaattct
tcatttcacataatacagtctcaaaaggccacagagaattcagcctcgcttatctctgtgttgcagat
gatggcttctagccttacccaatcccagtgcagcttgcttgccatccaggagtcgaatttgtttccat
ctgacattagcgtattaaaaagattggagatcaacaagcaacaatgttcttgtagaaaggtaatcaag
gtttagagcctgtgtgtcatgagactcctagcatttgaaaccgctaaggggttgaccaccattgtccc
aagcacctgtttaagattctttcctatgataagggacctaaagtgattagcatactgataagattttc
ctagaataacctatttatttcagtattattctttcaaatcttaattaccatcttttcctttacccagg
gtcttctttctacctctacgacacatttaattacctatattccccaacctgtaccatattaaattttg
aatggaagttttatagggtaatttattggaaggatggccttgagtgtcattatgttcaatgaatgccc
tattttgacaaagagatgactaaatgttattgaaatctttttaatccaccacgcttctgcttagatgt
aaatgcaaatctgttctttacatttgtgattgaattgaacttgaaaagtaccgccatattgattcctt
ctgcaaataaaatataattacatttccctaaactttctacactctcccaagagattggctggctttgt
attgtagatttttggtgatcacagaggacaatgcattatcataagaccaataagatttatttttacct
tggtaaagaattttaatttatttctagtttcattttcatttatatccatctcttctcaccctctgctc
tacaaaagtatatatgactatataaattgaaaaaaatatcaagtgcaaaattacagaaataaataatt
aggttattttagtggaggaaggtttgttgtgggtggaggaggagaggagtgagccaagaaaaacgagg
gaccatacgtgatcatatttttgcagctattttaaattgtttgtgtatatactttaaaatattataaa
ataaaattttaagtgcaatgcatatttggagccaatgatgagggataacttcagaaacgtagcatcat
catctagtgctttcatagtcctttcaacatttccagatagttttaatggcctgctcatggaggcaatg
ccctaattttaacatatctcttcacaactctgatttcttgcttcctaacattaaatgtcttcaaagct
tctttcaccactaattccttatcaagaggataagccagtttattctttaagaaaaactagctacacaa
aaccgtaagtcattccaacataaatccttcactatcctctctctatagatttggttttgattcctcct
gctgaaattcaaccttctttcttcagctatccacacgtcttaccctctaacttccctcaggagtgtct
attagctcccattacagtgaccacagtaatatagtaatcccctgctgttctcactctccacttcctta
cactgcgttttaagtctcttcatattctttatcaccttgtatcatgcatcggttttcttagttgttta
ttttatgttgccttcataaattccatgagagctcactgccgtatctttagaacatggaacagtgcttg
gaacataatgggcattccttaaatagctgtagaataaactttcaaaatcaacaataatgtatttgcca
aatccattggcttctctgccattttatcttgttcaataccactgcgatattccccttccttttttttt
ttttttaaagtctgtaaccctttagcttctgtaatattcctagttttttattcctctcatgtgtcaaa
atcatcagttgaggcttattgttttctctttctcactctgacctcacctttgtttacatctcatcttc
tggctttggctatcctgttttttatctctgttccaacctgtatttctagccctactacctggacatga
catgtggatatctccgtatgaccgcagtttccatatgactttgcaaattcatccctgctctcccctcc
aaagtcatccccacaattgacttcctgttccttccaacctattaaggttcaaacccacttttgctcct
cctttgcaggctacacttttccttctcagtacctcttttttttccaagttcttagataaaagtcatag
taccttacgttgtaattgccactggtctggtctttctgcctgctttcctttccatttgtaatcacatt
atccattccaatccatttataatactgtgatcagccataaaaataacatttatcatatcgtttgtctc
cttaaaacctgtagtagatcccctctatttacaagatctggtataaaatcacccttcctgatattcaa
tgcctgttttaatataatctcaatattatgcgtcataaatccccctgtgttcttgcactttttatttc
ttatacatctcatcaaccatgtcttatcaactctcaaaacctgtattcgttttcaggaaaactcataa
attattcttttgtagaccttttgtttgtcatctttgaagatctctctctgaactacaatattttgtct
gtataatcaatttggaaattcatcaggtattgaaatatgacatgtcttctattgtcttgaacattaat
taaaactttatttgactttttatatgcttacatcttgtttcctcacggagtgttaacctactagaaag
taatagtttaatcttatatttattttaattcagatttagtagcatactttacacgtggtaggatgtgt
aactgccttacaccttgcttacgtgagttattaatgttttcgtatatttaatctgaggatgtactagc
aatgttaaaactgtaccgcatgaaattgagtaattgaactatttgttttaaatgtgttgcttaactta
ttgtaccattttctcataatcacagctcaagttaactttgtggttgtacgtattatttcttgtgaaat
gccaacaaacttagagcaaggaaaataacaggtataatcatactataaaggcaaccttaacactagca
tagtctcttagctcatatggtaactacaataatgtacagtgacaaagagaatattgtactttcttagc
acacactttcctactactctactgttgtggataaaaacagacatactttaggagaaactatgttattt
ccaaataatgccttaaaggttactccaggaaaaggcatttacataaactatctaggaaaagaaccttt
taaataatataaagagctcacccaaaaggactgaagtgtttagttgaaaaaaagtaaaaatgtcgaag
actttgaaaaatagtttcttgcagtatattttcatcgcttccacttacgttatgaagacattaagcgc
tagtttatcaaaaactatttttgtacatgtcttctaatgacagaacaatgtcaacatgattttcatca
ttgagaatgcgtaaagaaaccctttgtacagttttttctatgaatgttcccctaagattaaagcaaat
ttccaacacgaattaggcactccgaaaggaggaggggagggaggggagcaagtgctgcaaaacttcct
gttgggtactatgttcactatctgggtgatggaatcaacagaagcccaaacctcagcatcacgcagta
tacccttgtaacaaaccaacacatgtacccctgagtctacattaaaaatagagattaaaaaaaggaaa
tcagtatataatctaataaatacctctcaagctttctcatttttaaaataaaattttagattattatt
ttaggaataaaataggctcttcattgtatataagttcatttctgagttgcaaaaatcctctctttatg
tttttttccccgtattagcatgtttttctcctgtttttccccactcaacttggctgccacaatcagaa
agcacaaagacaattttttcttgcgcttgtaaatcaaaaccttagcatcagacaaaataactgctcca
ggtctgtcaaatagattcatttgagctttcttcatgcattgaatacggcagaatttctgacctgaaga
aatctagccttttccaaatttgctttaagaacattttgcaataaatttaatataataaaaggaaaaaa
cacatcaggctagaatttggaaccgattgttattaaaaatctcaagtctatcaatttaacttcaacaa
attacttaatttctgtgatggttaatttcatgtgtcaacttggctgggccgcagggtaccgagacatt
tggtcaaacattattctgggtgtgtttatgaggctgtttctggagagattcacatttgaatcagtaga
gggagcaaagccgattgttctcccttgtgtgggtgggtctgatccaatcaattgaggacctaagtcca
atcgattgaagacctaatcaaaaagcctgattaaaaggaactcctgcctgatagctaaagctggaaca
cccatcttttcctgcctttgagcttgaattgaaaccttgggtcttcttgagtcttaagcctccagttc
tggggctggaacttaacgtcattggctttcttggttctcatgcctttggactcagacaggaactacat
cattggctttcctgggtctccagcttgctgactgtaaatcttgggacttctccagattcgtaatgagc
caatttattacaataagtctctccctctctggtttcgagagagagagagagagagacagagagagaaa
tgagagcacaagaacgtgagtgtgagagtgccctaatataatttctctaaatatcactggttactctt
caaagttataaaattggtataaaaggtgacctcaatttttcatggagttaatgtatgaaagtcacaat
taaaaaggaagaattagttctggtgtcctgaaagttatttgaataaattaatatgctatggaggcttt
aaaatactatgaaaatttaatattgtattattcttagtgttgctatttttaaatagcactttttcttt
tcctttttttttttttttttttttttttttgagatggagtctcactctgttgcccaggctggagtgca
gtggcatgatctcggctcactgcaagctccactgcccgggttcacgccattctcctgcctcagcctcc
caagtagctgggactacaggcggccgccaccacgtccgggtaattttttgtatttttttagtagagac
ggagtttcaccgtgttagccaggttgttctcgatctcctgacctcatgatccacccaccttggcctcc
caaagtgctgggattacaggcatgagccaccatgcccggcttaaatagcactttttcttgtgagtcac
tttttaaatatttgtgcaaaccttgttgccattctactcaagctaatatcctaaaccgaggacattat
aacatttcaggagtcaaaacttcagacacttaacatagtatcctcaggttcatccatgttgtcataaa
tgacaggattttattcttttatatgactcaataatatcccattgcatatatatccaatattttcttta
ttcatccattattaaacacttaagttgattctatatcttggctattgtgaataatgctgcaataaaca
tgggaatgcagatatctctatgacatactgattttatttgctttgtctctgtccccagtagtggaatt
gctgtatcgtatggtagttctatttttaagttttcgaggaacctccataccgtcctccataatggatg
tactcatttacattcccaccaacagtgcataagggttcccttttctccatattcttgccaacactttt
tatcttttgtattttgataatagccattctaactggaatgagatgatatctcattgtggttttgattt
gcattttcctgatagtgatcttgaacattttttcatatgttgtattaactaagccaaacacagaaaga
caaatgcagcttgttctcattcatatgcacaatctaaaaacatcgatctcatagaagcagtaaatgga
cggtggtcaccaaagaatgggggaagtaggggaaaagcgagaatggggagaggattgtcaatgggtac
aaagtcacgattagaaaggaagaattagttctggtgtcctgttgcatagtatggagactattgtcaac
agtaaggtattgcgtatctcaaaacggctagaagagagggttttgaaggtttctaccccaaataaatg
gtaaatgtttgaggtgatatgctaattttcttgatttgatcaagtaaaggtcttaattgtttggcaat
taagactcatgaatacaaataaaggtcttaattatttggcaaagcatgctgagttttgtaaacaattc
agtagtgatttttgagaataggtcaatagcaaatattaattaaaatgtcttctatttatgacctacag
ctagatggtaaacagatagatgatagatagataactgatagataactaatagatgacagataaatgat
aaatagataaatatagataatcgagagagaatacctttcccttcacacacgtgcatataggcacactc
catttctatcatagttaccaggattcagacattttgtctcactatttttctcaatgtgaacatgcata
taggaatattatagtttttgttctgtgcccattttagttcgttttttaatatttcaggacaaaggcaa
tatggcggtttcactttgtttttcatttttgcttatactttttaaagctcagtgtagaaaagtttgaa
aatacacaaaagtattaaattaagacagctgggcacagtggctcacgcctgtaatcccagcacttcgg
gaggccaaggtgggtggatcacgaggtcaagagatcgacaccatcctggccaacatggtgaatcccgt
ctctactaaaaatacaaaaattagctgagcatggtggtgtgtgcctgtagtcccagctactcgggagg
ctgaggcaggagaatcgcttgaacccgggaggcagaggttgcagtgagccgggatcacaccactgtat
tccagcctggtgacagagcgagactctgtctcagaaaaaaaacaaaacaaacaaacaaaaaagcacct
atagtctttctcccataggttgccttcttaatgggttttacaccttttgatgttttcttgagttctgt
cccattagcaagtagtattgtacaaaaaaaattttatcatcttttatttaatattttattgatgttta
ataattagaattattttaaattttatatgtcattttaaaatgcaatacaatatagtaaactcccagat
gtgattgtaaataattaattattctcccattattgggcattgggactgcttccacattttggtcactg
cagtgaacatccttgtacatgaatctgtatgttgaagttgatttcattccacactccccttcattcaa
ggggctccaaccattctcgttttctttcagcttctttatatccaggcatataaagttccttcctgact
cgggagcgtcatacatgctgttttctccatctggataagtagttaattctgttcttctttgtgcatct
cccgtttcagtaacttcatctccaaagcctttccaggtcactttatctaaagttacaccataatcttg
caaatcctcaactattgagcattattagtctccgttatcattattctccattattctctgtgaaagca
tcccgtgattttcttttgtccctattaccacaatatgtgtttattccgtgtatgtacatctttgtttg
tttattgtttgtctatacctgcaatgaaatgcctaaggtcaggaactgtctgatgcaggatgcaatgc
gctcaataaatatttactgaacaaattaattcatttgctcagtcttgcaggcaaatggtacttctgta
tatttaaatatctaaaatgaaagcgttactcgttactgttggttgtcaatcaaaatttaaatgtcgat
gtttaagcgtgaaagacctctgtcaagttaatctgtacttacccaaaggctattatgtagaagcgaca
taaatattttcctaaatgttgattttcatattttaagaagacaatgaatgtttcaaagcattttcttc
tacacagctatttattctggagagtggggcatatgtttcttaatattgttaaaattggcaaggggata
ctgttgctatatacaaagaacacctaatcatcatgcagacgttttgtttctggctctcagttatgaaa
agcagagattttaaaaagttacctttatatgctaaattaggaatggcagaaggtaatattctaatgtt
tataagtggttcttctctgagtccttggtttctatgtttatgaattctctttttgaaagaaattatag
ttattattaccaggtctattcttttacattgtttctaattctatggtgatcttcaaaatagagtatca
attttaaatacttgggaatgaaattattcttcccatatcatttctttgtatggcatacattgtgattt
gttgtcccatcattgtttcagtatgacctgttactgcaaaaacatattgagataaatcatcccacata
ctctcggccaggacagacatcacactgttgcagcaacacttcagatgagccccattcaaccttgtgtt
tttatagagaaggatgccacatgtttatattcatttctgaagattggctcatattatttattgaaaca
tactagtttaaaaatctgtccatttatataacacctggtctatctacataacttgaattacataaata
taaaactaaacttcccctcttctccagtgtatagcttgcaagcaagtgcatgtgaaataaattaaagc
cttgtttgtgtttttttcatcatgtgagtacaagacttttcaataaaaatgaattacttttgaacata
tttgtttggacaacaaacaagagaaaagatctatttgattgatagtggacagaattttcattaagttc
aacagcagaaataccacaattgcatcattcaccttcgtgtatcaaaagaaaacagaaaattagatgtg
atgaactctacacaaatgttcactatgcatactttacccattaaatacattatcaagaatcatgtcag
catgacattctaatatagcagctttacaaaaacatgtaatctaatctagggatgctgttgtcctcttt
aaatcagcttcaaacatattctgggttgatatttctcattcttttttgatccacattgtttattcaca
taatgattatatttaactgaagataacagcattatcaaagtgaaagacaaaatagatgtttaatagga
aagtgagtatcgaatcatcttttttctaccaaaaacatctataattatgaagtatttggttaattatt
ttcacaataatttaaaagtgtacaacttgccgatttttttgtactttctacttttcatgtctcgcata
tatctctttaatatctaagtatttgagtcagaaaagagccagtaccgaataatgggaatctcactgaa
atgtgataacaatctggggcctggtcctgggacctttatctgcaggacaacttggacaaatatttaga
cccccaattcctcgtctttaccctaggaataataacacatttttctgacctcatacttcacgtggatc
tcaaatggaacaatcatctgatagcactttatgaagtatatgaaagcaataaattatcacaataagat
aattgcaattattctttggcatagtattagtgatgtctttatctgtctgacaaaatcaacatttctgt
atggtaactgcctttccttgttttaacagaagatcatgccagaaaagatgagtaggtagatacttaac
ttgttgttcctgaatctggaatgtattgcagatgtcccagactgatctttgttcttttttttccttac
aaatttcttttcacattgacagtgtgatatttctttaaatgtgcaatacatagctaaccttatttgtt
tgtgtttactaattaaaatatctaaactgcttaaaggagaaaattcagttttaagttttattgattta
tacccttcttcaatccacataggattagggtagtatgtaacaaaatttcaaactataaatgaaatatt
gagttttgtattaaggccaaggatgaggaaaaaaaaagtaagtatatatggaaaaagaatggtattga
atgggagttttgatggagcatgttgacatcatgataatacctattatctttatattctgaatgtcaga
acaaaattagagcaattttcccttatttccctacaatacgtctgtcttaataattctaagctttcctg
atttcagtagtaatctgtattttgcaaaaggcagcatgtttataagatatcaagtaaactaagtttat
ggaacttgtaacagcatttttaacaacatttctccctagatagttcatggtagacatgaatttattca
aaactagtatgtagaaaaataccattaacaaaagctctgaaattatattagaggagctgaataatgtt
acttgagaaagaataaaatgttatttatgatttttggtatcttttacccactatatatggccatatct
ctgaaaaactttagtaatatgtactaatgcaaatatggtagtaaattatgtctacaggtgctgatacc
atagtagataaagtatgataactttattttaaaatatcatatttaaataattaatatacagtactggg
aaagactattttatctattctctcactcttgaataaaaaaatccagaaaaaaataccttgttttggta
agattatatcaatttatttcccaaatgggtagagggttatttttttctgatcataaacgtatgtctct
tcattataaaaatccactaaaagtgatagaagaaaaccaaaagaataaatgtaaacaatgatgccatt
ttccaaaaatcaccttcgacatttttctggatattgatacagtctaaatctcttttcggaagactccc
tcctgtgtaggttccccaactactctgcaatcttatttcctcttgttctgttcttgtagaaaggagac
ccattgtcaccatgtcaaataacacaaaatggtgcacgtataagatcattgtctctgtccattatttg
ccagaggacctcaaactttttcaggtggtgggcaactggatgtcatgctgctccttgtacaacagaac
acaattcattatttatatggttatttcattttaagaaaatttaactttcattagctggaaaaaaaaag
aagtggtttttaagttgtttagaaatgtgaaattcaattttcatactgcaaaagagattcaactgcaa
acacaggcacacatgtctggtgtaagaacgagttgtcatacaaacccaaattagctgcctccacgttg
tctttgttaacaagtgtttgtttgctccttgttccatcattcagaaatgctctttagcaggaattgat
ggaacacagtcgcagtgacctcttcctgtctttaaaaatcgagatgacatttgcccatctgcagtgtt
aacatagttcctcaaagaccactgacagtggggtaggactgtattgcgcaagttctctcatttcccta
gaatataattggtccagggccagagattttagctcatttagagcagcaaggtgctcttttaaaattcc
ctcacctattttgggcttcatttcccttatacggttatgccttttccagtctgatgaacattctcctt
gacagagcagacaagcaaaaggagctgcacactgctgctttctgtgtcgtctctatccctaaccttct
cccttctgccccaatcagtgaaccttcgtctttctggttcttcttcctccaaatggaagtaaaaaggc
cctgaatgttgtctttaccattatcacgagcctcaattcattccaagctcagcttttcctcactgttt
atacagttctatattgttcttctaatatttgccctcagttctctgtccctcgtttcttcccatgttca
tactctattagaatctgagcacctttgaggttgtccatacagtggcacacatctttgttttatactca
ctgggatgatttgccattatattgtcaaaattttattctaaagagcttttacaggctttcttgagcca
ttttctcttgaaattcaagatcgttgaatctctacgctttttccttcttaatctaataaacatacacc
cccacatacacacgtgtgttcctgaaagacagatgccacttgactcgtcttatagattgtctaaattg
atcattgtgtgtggggataaaagggtgaattgtataatatccctgatggttcacgaagtctgttcctg
tataacctgattagtcttctgaactcttttaaattctgtctgcaaatgactgaggtttggcaatcagc
ctatttcagttagttgttttcttgcataagaagggtccatatgtactgtgtgaagtaagagagagaaa
gtacttagatttgctggatgccctgattgttagcatggctaaggtattgtgtaagtaaggagagcagt
taaaaatgatattgtttttatttcttaattgaggtaaaattttatataagatgaaacagacttatttg
ggagaggaggaagagtttgttcttacataacatttcaacctgtcatatttagttgagaacttcaatct
gtcaagatactttgtataatattcagattctgccatctaatatattttccacgctttcttactgggtg
tgacagtaacttatactgtggcaggtgtataagttagtaaagatattaaatgctcaatctgttaactt
ttgtgaagtggtcccactgataaagtgacacctcaataaaataaaaatttccattacctcagaaagct
ttttcatgctaccttccagtcaattcccagccccaataggcacctattcttctgatttatatcaccat
agattagttttgtctttttaaaaatttgtataaatgaaatcatacaaaatgtactattttgatcagca
tactacttttgagattcatccatgtaagtgtatcagctgttcattcctttattgatgattaatattct
attgtatagatataccacaatttatttatctattctccttttgatggacattcaggtggttttcagtt
tttggctgttatgaataagatgctgtggacatttgtgtacaagccatttgtgagcatatgttttcatt
tagtttgagtaactctgtagaagtggaatggctgggtgaaatgtttaaatttatgagatattgtcaaa
cagcacctaaacagttttctaaagtggttgtgccattttgcaatgccaccagtgatgatggagagttc
cagttactctacatctttgtcaatatttggtcttgtcagtcattttaatttttgctatcttacagaat
atgtaggtatattgttgtggttttaacttatattcctctgattactagcactattaagcatcttttca
tggatttattggacattcatatagattatgtgtgttgaagattattacctttatgattattgggtgaa
aatagtatcattttgaggtcattcatataacttgaagactgggaatgacagacattttcctgttttgt
ttcttttctttttactttatctgaagagtctactagaatgcagtgttgctgcctgagcagcagggcat
tagctttgtaaaagctctgttccttggcaaccccaccactaatatgaagtgcagaacatttgaattgt
ctttgaccagcttcagcatcagcactattttttttttttgctagacccctagtaggtatttaaaagta
cagaaatagaatttaatcatgctttttaccaaatgtgctatgctcttagagattctttcaacgtgcat
aaaaattctgcagtttcaccacataccagtaaaagaaactcagtcactcatttagccatttagtaaaa
agaacaaattaactgatgagcatagtggagacctcaaaggtaaagaagacaatgtccctgaaataaag
acaatcataaattttcaatcaaaataatgaaatttaggctgggcatggtggctcatgcctatgatcct
agcactttggaaggctaaggtgggaggattgtttgaggccaggagttcaagaccagcctcagcaaaaa
agtgagaccctgtctccacaaaaaaattttaaaaattatctgggtgtggtggtatgcaccggtggtct
cagctactcaagaggctgaggtggaggatcaccagagctcaggggttggagactacagtgagctatga
ttgtaccactgcactcaaacttgcatgacagaatgagtccttgtctctaataataacaaaatttaatt
tttatagactgtgaaaaaccattatgtagatacagttcaagtacagtatgattttataggatagataa
cttttgcttgaaaatgtattcccaatttataggatagataacttttgcttgaaaatgtattcacaata
gagttagtatttggggcacacctttatccatttaacaaacatgttttgagcactgccaggtagcaaca
cgttactaggcactagagtgagaaaagattacagttcctgctctcatggatctcatggtctagtcaac
tggaatgaaaggattacataagtagaggtaaagacacacatgatggaggatggagaatagtcaaaggt
ctggagaatgaccaggacgtcactgtgagttgtctaattgcactgaagcatggatgaagaattggaaa
gtcattgtaagaagcctaaaaaggtatctctcagggatgctatgaggttctgaatgttatgtacgcta
tttgggcttcaacaggcaggcactgagtattcagtataaatttttgagcagggaatccaccagaagaa
ctatgcatctggaggattaatctggaaagattgtgtagaatgttatgcagtgaaagagtctgagatga
aacagttaggagggtgtattaataacataggtgaagtgtaatgaataaccaggctggaggaaaagcaa
taacgatggaatcaaccgggcaagaagtataacaattaggatcagtaaaatagaatttggattggagg
aatgaaaaaaaaagggacaaaacaaagttgaactgctggtatccatactggaaaatacagatgtcatt
caaataaataatgtaatgaatataagaaaccagttttaggagtgaagtggatgttggcttgaaaatat
ttcctttgaggtttcagtcaaatgaaaaggtcctgaaatgctacgtggtagcctaagaaggaagcgtt
cctagagagaaaaaaattagaaaagatttacatttgataatttaatcttttccttcatacaagctaaa
ttgataagaaagtaaaacctatagttttcaccactcttttacaaatatccctaaccttttagatattc
acatgaataattgagaaaaatctaacagatgacttgcttatgtcatttgtctgctttatccttaggtt
cctctggcttatatattgttcaataaaatacagatcattgatattgtacaatgtactgataatgggga
gtgaatccatgcttgtgcattcttttttttttttttttttgatttgcagagggcgtgcccagtcaaca
agagaggcacaattgtttttatcatcacctcttctcatctaattccatgaaggagagtagtattacca
tacaacagataatgagttggaaaacaagaaacctaacctcagaacttaaggcttggggaaaaataaaa
gagtaatttgtgtttaatgcctgtataacttggcaagagggacatataaggcttagtgatgcccaaca
tgtgcttagatgtggattgttagttgatgtcttgggggttctgtaatctaagctaaatgctcaaaatc
aattaattgatgttagacacagagatctgctttgatccctctttatcgtatttctaggccttcccatt
ctcaagagcctgagaaacgacagctttccttaataacttgttatttgtggtaggagatgaaactttga
taaaaacacaattatttttaaatgtctctttttcactctaggctgttgtatgtatttcaaaaagttac
ttttgaccctttccagaatgagaaagcaatcaagaagattataatatcttgcttagttttctgctcaa
tttatcaacaaatatttcttaagcaattattaagctgagcagtgctcagcgctgtacttggtgatata
ggaaatggggaaaagactgtctttaaggcctttataatagtaattacctcaacttgtctgtttctttt
ccttaccatttcgccaaattcattgatctatcttgttctcaaagcaatcgccatagttatattgtaac
acagcattttctagggtgtccccattaagttgagagtgttgacaagaaaatacaagcttatttatcat
tgtaaaacttgagacacctagtagttaccctaaattaaatatttgttggagtcagtcacactaaagag
aacacttactgcattgaacaatttacctacattagacagcatttaaagactatgccacagcaaaggcc
catggaattcttgtgaacacagaatagaagtgtattaaggaacaagcttaattctgttctcttaaagc
acaacactttctcaaaacatattttgaaatcacctttgaccattttttttaactaataggtgggtggg
agttagggtaggaaaacacaagcagcttcatcaaaacgatattctattttcttcaaatttgtggggaa
tcatacggcctctcaattttctacattatgctaattatgatattaatctctctgccagcaaatgaaaa
taatacatattagatgtagcaaatgtcaataatgacaaaattagtcatcatgcagatactcagggatt
cccaaaatatgtttggattatgattgctagctttgagtttgcccagaatcgtttcaataaaaataagg
gactcaaacacatttggagcaaaactcacatcataaattttagacatagctctgccaataatgctctc
agttatattttcagtcctaatatttcctctgagttccagaccagtatcttcaactgtctgattgatac
tctctccttcatttctgtctccaatgcattaagtcctgtgtatttactttccaaatgccacttggttc
catgcacttctctccatttctgccactgactcctcctcaatccaagcgaccatctttcctcactttaa
ctaccatgatatctcctgcttggtctccttacttctattcccgggctcctccaatccattcatcctcc
agcagagaatgatgactagcaccttccacagtgtctggctaataggaggtatccaatcaataattgac
ttacagagtgaaaatataggcatggcaaataccagtagagaactacagggttttagaaccaatgacat
tagatacttccatcaaatatttacagtgtataatcaagttgacttgcacattgtcttatttttgaaaa
acaattttgttggctttttctatatgcacacatacatattgtatcaccctctacccgccaaatggctt
ttgaagaagtatttatgtggctccaaattgataatacctctagagagaagagaaattagaaattttaa
aatgacctatgcttcctttcgaatatcacgtcctgagacagtgttttttgagttacgtgcaatatgtt
ccacgatgaaacatttaatgtgttcagaggcatgctagtaatcatgtagaaagaattttatgcctgaa
gtcacatgttctataaccaggatcacttaataagaaaacaagtacagctgtggacaagatgccttttt
atcagggaaaggccaatttgttttctttgcaaatctaagtaaatggagagaaaaacacagcccttaaa
tgttttctatttgtcctgaagttctcatgaatgagttagaaggcgagaaggattaaataaatccttga
acgtagagagagctaacatttattttagcaaactaaaacctattcgctttgcaaagttctgttctgta
ctttgtaacaacagttttctttaaaacaagagccaccaattcaaatgcctttacagaatgattgaatg
ctttcatgccccacctaaaggcattcaaatcattaatcaaacaaagttctaacgccaaaacatgtctg
ggaccagatttaaaatgtagccctcagtttcagagggcaaaaacttaacatatttatattttcctcac
tttaggtaacactgtattgaatctctgcttgaaattgaggagcacgtgattttttctttttggcccag
ggcagcatttcttggaagagaaagaaaaacaacccaagatacccttacaaaacatgtagtacttaaag
ctctttatgatgaattaattttggtatacacattaatagcagtgataataacaaatctatatatatat
atataattgatatgaataagataaatacatcaaaaggaaatttcattacaatttgatattaggtaaat
gtcccattaaaataaattgctactgtacataattttccttcagttcattggcaggatgtttgctttgg
aaaataaacagtctatttctagttttagaaggaattctcattattcttttatagcaaccattatcagg
agcagatgggaaattgtaccaagagcatatctactattatacctcacaggaaaaagagagtattaaat
gaaatctaacaaggcctgctcctgactctagttcctgtaacaaatgaacacacacatttgtatggttt
cagcatttgtattagtaaggtacaataaatgtttactgaaattgaaaaaaaaaaagataacaggagaa
agaagaggctaaaaaggtgcattttatttctgatcgttcattgtaaagactgctcctttttaaaataa
tcaaattttattttatatacagagggtacatgtacaggcttgtcacaggggaatagcgcatgatgctg
aggtttggggtacagatctcatcacccaaacagtgagcatagtacctacctgatgagtagtttttcaa
ccaatgcgcaccctccctccttcccacatctactagtccgcggtatctgttgttcgcatatttacgtc
catatatgctctatgtttagctcccacttataagtgagaacatatagtgtttgtttttcctgttcctg
cgttaatttgcttatgattatggcctccaactgcatccgtgcttccgcaaaggacatgatttcattct
ttttatgactatgtagtatttcatggtgtatatgtaccacattttctttatccaatctaccattgttt
cacaactagatggattccatgtctttgctattgtgaatagcacaagacaggacctttttatttgactg
agttccttgcaaattactaataaaagatctggaggtccttagttaaaagttgaatctgtagtgccgtt
caaatttagagatgtattttctgttcaagagaagaaagccctcattcggtcatgcttaatattcagct
gtaaagtccaaaacatatgagaatgacacaaatggaaacattttataaatacctatacaaaggagggg
cacttagttcccctaggcctcttaaaagtcctctagaaagagggtacttttatgctaactattaaaga
tgagtaacgaatttgtcctatacaacttaacagtatcgtcaaggaagtagaaagttactcagttttac
tgggcattggagctaagcttgaaagtgaggaggagaagcggcaggagacggagccgagaaggcagtgg
ggagaagaggaggatggtcctttccatgctccctgttgtactaacatgtttggatattatcttatact
tcatatatggactggattcttgtccttctcattctgagctctccttgaccttgattcttacctcctat
aactttcattctttctttactcaaaaaaaggccatttatttcagccatttttcactgttttcttatcc
ttcctagttgcttttctatactatttttccactcttttttttttctatactattttgcccttctctcc
attttcctaactgctagatttccccaattttagccatctttcaattgttctgactatcctcaggtgct
cccacaaggttatcagaccttccaccaagacggaatccctcagtctatggacaggctaagttgaatgg
gtcctggtgctgtgcttagcatatgccttgagtatttgtgcatttattttgcttctttacaaaaatcc
atcatccgatagaagttgaaagaaacttgctgaagcacattaaaatctctgaaaacagtattggctat
attttctaataattagcatgactggttaacttgctttatttatcattgaaaaaagtatcagaaactgt
atatcaaactcctgaattcttggcactgacgaagagacacaatgagaatgaccttaggataaaaaaac
aagataaagcaccatatttgtaggaaattgcaccataaaagtctgtttcacaactctcccaaatttca
ttttattacatcttttctcttgaccaatcagtaaactcggttaatgatttacctgtctcaaaataatt
catgaacaaaattacaagtaaatctcagtattggattcttgaaacatctccttgttcaatgaagtttc
ctttttcttccctctatttccctgtatttatcttttcttccagttgcattttatctcttctgtttttt
tatcttgctccctagtttgtgattttttgccaattttttatttcctacataattcatccaatctgtca
ttgtacaatttcttataactgcttcttagcttattccttttcttcatttgtcacattctatttttcat
ctattgtgttttcatgcagttttggaaagttttacaaatagacttttaaaaaaatgtacgtaatgttt
tcatagaaaaggtagtggtttctttttcttatatccttccctgtataaaaataaaaatgtagcagttc
tttctttgcctatgtttcctctttccttcccccaatttgaccagacttgaaggacttagatatgtaac
agtgttattttctataatttaggaacagcttttgacttaaaaagcagaagagaagttgaaaataatat
agtaattctacatgtccttcctgcttcccaactctctgcacatgtttgtaacctcccctttctttttt
agtgtatctctttcatatacctttgtccccagaaattctgattcagtagacttagaatggaattctgg
gcttttatattttgaaaagctccccacgggagttagatatgcacttcttattaagaatgaatgcttaa
tattggaatcaaaacacaataagctttctaactatgatgaataatccaacagatttaattatgatttt
ctttttgtccagaaccaagactagatgttaattgccagagaaatagataagaatgcctatgacagcag
tacattaatatgatatcaaagcttggaaattttattggtaatgaataattcagtacttaaaatattta
gaagctatagaattaaaattaattaatgttgttcactgtgtgaataaagttgattgagattttacatt
taattttgtaaacccagtgttatcttttccagctcagaaaacaccacatacaagctactactttctgt
tttgatcccttatttttctttcttatgctttatcactgaaaactctccttgagcaggccatgcactgt
aaatatttctcctggttgcaaaaccttctcatacaaatgcagtagactgtgtaatgagctcttctttc
acaaaattaaaaaaacctgaaagccctgatttgcgattctatacaaatgagatttagatctaacaatt
ttaaattattgcttcactcttagctgttcaattctatctcttatttgggaaaccgaaataataaaacc
attgctgattccacaattaggttgtaaaagtcaccgtagccatcagccatgaagcaaaagtgccaaga
tcaaaactacaaagcaaagaggctgagataaaaatgctgcagcattagtttatagcattataagcagc
aataagaattccttgattgcttaacaaagactcaaaaggcatttactccattaccttacaactcaaag
aggtattcctggaccagcagtattggcatttttttgaagtttgtaggaaatgcagaattttggtgcct
ccacggacctaatgcagcagaacttgcagtttagtaagatctccaggagatttgtatgcgcattaaag
tctaggaagcaccgctatggtatacatctgatgtgtgcccatgcattttttaaaagtatgaagtaata
gttgtaagtattggacactcttgaaggaacaaataagagccatggtctttactctctaaatacctccc
tgacatctatgttttaggcaaaatttttttcccatttcagtagtcactgatgcttgcacgatgcagtt
tattccaaaacaatggtgattctcatgtaatagttcatgttgccttaataatttacgttgcctcaagt
tctctgcccaggccccaatatacaccgagggctgtactcctcccctaacgcctgctctcatacagtgg
catagagcccagttttatgctcttggtcacatcatggagattgcacaccacaggctttaacttctgcc
gtactctcactgcctctaaccctccatatgcctaagttctacgattctttaaattccaaattgaccca
gaagtctcctccgctcatccttttcactgagatcatccctcttctggcctaccatttgttgatcacct
tgctttttttttatcctactgtatgtagtataacaaattatcacttgcaactgtgtcttattttttca
actagattatgtactgcctaagacctagaaaattgtgcttatttatttgaatctctaggaggatcagt
aatgggtattaatactaatgactccatggtgatgatgagcctgaacttcctcccttcctttctttcta
cctctctcctttcctcccttcttttcttcctccattccttcctctcttcctccctccgcttcttcccc
acttcccttattcatagattcatgcgttcactcagcaaatgcttactgaaaccttccatgcatcagac
attgtactaaacaataggaaactatcatgaataagacacaatatctgacctcaaagaatttatgatat
aaaagtaatggcataaaccgtgattacttttgcaccaacctaatatatagacacagtttgttatgact
ggtgtctctattactaagcaatgactgtcacatgcaacgctgatctgaacaggtggtaaagagtgaga
tgtaagcaatggagcaaagccaactagttacaaggaaatatcacatgtttactagagcacatctcatg
ggcattcaagagagtatggccaggacagcttgtgaatagttcagtaactgtgcatagttttatattca
ttgtgaggcaccgtgtcaccggtttgctgatttacagagtattttaattgctaactgtatgctaccaa
aatttccagtattcgaaaataattttgcttgaatgtagaaaaagaaaaaagccaagaaatgtatgtga
aacgagagtctaagggagctttacctcagtctcagaaaacatgcattccttccttcatttaggaagca
tgtactggggtctactgtcagcttgctattgtgtcaaggagtaggagaatacaaaaatattagagaat
atgaatcacatctattaggagagttttctacatacgcacattattctgtcagtgacataaggatttga
gtcattcagatttaaatacggtaggtacctcaagttctcagatattatttcattttctaaggttcgta
tttagttaatatgttattttaatggccttacaaattctagattatcttttttaaaaagttaaatagaa
cgtaattgccatttttatttaatggtaaaaagcatttttgtttttgtgtgtacttggttgtaatattc
tccttttcaattgagctatttttctgatactttactcttaaaatttcattcaggaaaaaagtaaacaa
tatttaagcttgacaatcataaaaatgctctggtgactatagattattttaaaatttattactgtagc
ttagggatatcttgatgggatgctcctgaaagcaattaattctcagttttttgtggcttctaatgcaa
aatacattgacgcagacagaatttgaaatgaattttcttctaatatagcaattaattttatttaaata
tctctagagtttttttttaatactgtgactaacctatgtttgttctttttcacctctcgtatccacga
tcactaagaaacccaaatactttgttcatgtttaaattttacaacatttcatagactattaaacatgg
aacatccttgtggggacaagaaatcgaatttgctcttgaaaaggtttccaactaattgatttgtagga
cattataacatcctctagctgacaagcttacaaaaataaaaactggagctaaccgagagggtgctttt
ttccctgacacataaaaggtgtctttctgtcttgtatcctttggatatgggcatgtcagtttcatagg
gaaattttcacatggagcttttgtatttctttctttgccagtacaactgcatgtggtagcacactgtt
taatcttttctcaaataaaaagacatggggcttcatttttttttgcctttttggtatcttacag

| DNA encoding gRNA | gRNA |
|---|---|
| GGGGCTCCACCCTCACGAGT | GGGGCUCCACCCUCACGAGU |
| (SEQ ID NO: 157) | (SEQ ID NO: 171) |
| GCACAAAAGTCAAATCGGAA | GCACAAAAGUCAAAUCGGAA |
| (SEQ ID NO: 158) | (SEQ ID NO: 172) |
| GATTTCAATATAAGATTCGG | GAUUUCAAUAUAAGAUUCGG |
| (SEQ ID NO: 159) | (SEQ ID NO: 173) |
| GTGAGGGCTCCACCCTCACGA | GUGAGGGCUCCACCCUCACGA |
| (SEQ ID NO: 160) | (SEQ ID NO: 174) |
| GAAGGATTGAGGGCTCCACCC | GAAGGAUUGAGGGCUCCACCC |
| (SEQ ID NO: 161) | (SEQ ID NO: 175) |
| GGCTCCACCCTCACGAGTGGG | GGCUCCACCCUCACGAGUGGG |
| (SEQ ID NO: 162) | (SEQ ID NO: 176) |
| GTGAGGGCTCCACCCTCACGA | GUGAGGGCUCCACCCUCACGA |
| (SEQ ID NO: 163) | (SEQ ID NO: 177) |
| GGGCTCCACCCTCACGAGT | GGGCUCCACCCUCACGAGU |
| (SEQ ID NO: 164) | (SEQ ID NO: 178) |
| CACAAAAGTCAAATCGGAA | CACAAAAGUCAAAUCGGAA |
| (SEQ ID NO: 165) | (SEQ ID NO: 179) |
| ATTTCAATATAAGATTCGG | AUUUCAAUAUAAGAUUCGG |
| (SEQ ID NO: 166) | (SEQ ID NO: 180) |
| TGAGGGCTCCACCCTCACGA | UGAGGGCUCCACCCUCACGA |
| (SEQ ID NO: 167) | (SEQ ID NO: 181) |
| AAGGATTGAGGGCTCCACCC | AAGGAUUGAGGGCUCCACCC |
| (SEQ ID NO: 168) | (SEQ ID NO: 182) |
| GCTCCACCCTCACGAGTGGG | GCUCCACCCUCACGAGUGGG |
| (SEQ ID NO: 169) | (SEQ ID NO: 183) |
| TGAGGGCTCCACCCTCACGA | UGAGGGCUCCACCCUCACGA |
| (SEQ ID NO: 170) | (SEQ ID NO: 184) |

1. A CRISPR/Cas-based genome editing system comprising one or more vectors encoding a composition, the composition comprising:
(a) a guide RNA (gRNA) targeting a fragment of a mutant dystrophin gene, wherein the gRNA hybridizes to a target sequence within intron 51 or intron 44 of the mutant dystrophin gene;
(b) a Cas protein or a fusion protein comprising the Cas protein; and
(c) a donor sequence comprising a fragment of a wild-type dystrophin gene, wherein the donor sequence comprises exon 52 of the wild-type dystrophin gene.

2. A CRISPR/Cas-based genome editing system comprising:
(a) a guide RNA (gRNA) targeting a fragment of a mutant dystrophin gene, wherein the gRNA hybridizes to a target sequence within intron 51 or intron 44 of the mutant dystrophin gene;
(b) a Cas protein or a fusion protein comprising the Cas protein; and
(c) a donor sequence comprising a fragment of a wild-type dystrophin gene, wherein the donor sequence comprises exon 52 of the wild-type dystrophin gene.

3. A CRISPR/Cas-based genome editing system comprising one or more vectors encoding a composition, the composition comprising:
(a) a guide RNA (gRNA) targeting a fragment of a mutant dystrophin gene;
(b) a Cas protein or a fusion protein comprising the Cas protein; and
(c) a donor sequence comprising a fragment of a wild-type dystrophin gene.

4. A CRISPR/Cas-based genome editing system comprising:
(a) a guide RNA (gRNA) targeting a fragment of a mutant dystrophin gene;
(b) a Cas protein or a fusion protein comprising the Cas protein; and
(c) a donor sequence comprising a fragment of a wild-type dystrophin gene.

5. The system of claim 3 or 4, wherein the gRNA hybridizes to a target sequence within intron 51 or intron 44 of the mutant dystrophin gene.

6. The system of claim 1, 2, or 5, wherein the gRNA hybridizes to a target sequence within the polynucleotide sequence of SEQ ID NO: 128 or SEQ ID NO: 156.

7. The system of any one of claims 3-6, wherein the donor sequence comprises exon 52 of the wild-type dystrophin gene.

8. The system of claim 1, 2, or 7, wherein donor sequence comprises the polynucleotide sequence of SEQ ID NO: 53.

9. The system of any one of claims 1-8, wherein the fragment of the wild-type dystrophin gene is flanked on both sides by a gRNA spacer and/or a PAM sequence.

10. The system of any one of claims 1-9, wherein the gRNA targets an intron that is between exon 51 and exon 52 of the mutant dystrophin gene.

11. The system of any one of claims 1-10, wherein the donor sequence comprises multiple exons of the wild-type dystrophin gene or a functional equivalent thereof.

12. The system of any one of claims 1-11, wherein the donor sequence comprises one or more exons selected from exon 52, exon 53, exon 54, exon 55, exon 56, exon 57, exon 58, exon 59, exon 60, exon 61, exon 62, exon 63, exon 64, exon 65, exon 66, exon 67, exon 68, exon 69, exon 70, exon 71, exon 72, exon 73, exon 74, exon 75, exon 76, exon 77, exon 78, and exon 79 of the wild-type dystrophin gene or a functional equivalent thereof, or wherein the donor sequence comprises exons 52-79 of the wild-type dystrophin gene or a functional equivalent thereof, or wherein the donor sequence comprises exons 45-79 of the wild-type dystrophin gene or a functional equivalent thereof.

13. The system of any one of claims 1-12, wherein exon 52 of the mutant dystrophin gene is mutated or at least partially deleted from the dystrophin gene, or wherein exon 52 of the mutant dystrophin gene is deleted and the intron is juxtaposed to where the deleted exon 52 would be in a corresponding wild-type dystrophin gene.

14. The system of any one of claims 1-13, wherein the gRNA binds and targets a polynucleotide sequence comprising:
(a) a sequence selected from SEQ ID NOs: 29-51, 87, 157-170;
(b) a fragment of a sequence selected from SEQ ID NOs: 29-51, 87, 157-170;
(c) a complement of a sequence selected from SEQ ID NOs: 29-51, 87, 157-170, or a fragment thereof;
(d) a nucleic acid that is substantially identical to a sequence selected from SEQ ID NOs: 29-51, 87, 157-170, or a complement thereof; or
(e) a nucleic acid that hybridizes under stringent conditions to a sequence selected from SEQ ID NOs: 29-51, 87, 157-170, a complement thereof, or a sequence substantially identical thereto.

15. The system of any one of claims 1-14, wherein the gRNA binds and targets or is encoded by a polynucleotide sequence selected from SEQ ID NOs: 29-51, 87, 157-170, a complement thereof, or a variant thereof.

16. The system of any one of claims 9-15, wherein the gRNA spacer comprises a sequence selected from SEQ ID NOs: 29-51, 87, 157-170, a complement thereof, or a variant thereof.

17. The system of any one of claims 1-16, wherein the gRNA comprises a polynucleotide sequence selected from SEQ ID NOs: 64-86, 88, 171-184, a complement thereof, or a variant thereof.

18. The system of any one of claims 1-17, wherein the gRNA binds or is encoded by a polynucleotide sequence selected from SEQ ID NOs: 35, 40, and 44, or wherein the gRNA comprises a polynucleotide sequence selected from SEQ ID NOs: 70, 75, and 79.

19. The system of any one of claims 1-18, wherein the donor sequence comprises a polynucleotide sequence selected from SEQ ID NOs: 53-56, 154, and 155.

20. The system of claim 19, wherein the donor sequence comprises a polynucleotide of SEQ ID NO: 55.

21. The system of claim 19, wherein the donor sequence comprises a polynucleotide of SEQ ID NO: 56.

22. The system of any one of claims 1-21, wherein the Cas protein is a Streptococcus pyogenes Cas9 protein or a Staphylococcus aureus Cas9 protein.

23. The system of any one of claims 1-22, wherein the Cas protein comprises an amino acid sequence of SEQ ID NO: 18 or SEQ ID NO: 19.

24. The system of any one of claims 1, 3, and 5-23, wherein the vector is a viral vector.

25. The system of claim 24, wherein the vector is an Adeno-associated virus (AAV) vector.

26. The system of claim 25, wherein the AAV vector is AAV1, AAV2, AAV3, AAV4, AAV5, AAV6, AAV7, AAV8, AAV9, AAV-10, AAV-11, AAV-12, AAV-13, or AAVrh.74 vector.

27. The system of claim 26, wherein one of the one or more vectors comprises a polynucleotide sequence selected from SEQ ID NOs: 57-60 and 129-130.

28. The system of any one of claims 1-27, wherein the molar ratio between gRNA and donor sequence is 1:1, or 1:5, or from 5:1 to 1:10, or from 1:1 to 1:5.

29. A recombinant polynucleotide encoding a donor sequence, wherein the donor sequence is flanked on both sides by a gRNA spacer and/or a PAM sequence, and wherein the donor sequence comprises one or more exons selected from exon 52, exon 53, exon 54, exon 55, exon 56, exon 57, exon 58, exon 59, exon 60, exon 61, exon 62, exon 63, exon 64, exon 65, exon 66, exon 67, exon 68, exon 69, exon 70, exon 71, exon 72, exon 73, exon 74, exon 75, exon 76, exon 77, exon 78, and exon 79 of a dystrophin gene.

30. The system of any one of claims 1-28 or the recombinant polynucleotide of claim 29, wherein the dystrophin gene is a human dystrophin gene.

31. The system or the recombinant polynucleotide of claim 30, wherein the system results in a dystrophin gene that encodes an in-frame transcript comprising an exon 51 joined with an exon comprising a sequence of SEQ ID NO: 53 or SEQ ID NO: 55, and with an intron therebetween.

32. The system or the recombinant polynucleotide of claim 30 or 31, wherein the donor sequence comprises a polynucleotide sequence comprising exons 52-79 of the human dystrophin gene.

33. The system or the recombinant polynucleotide of claim 32, wherein the donor sequence comprises the polynucleotide sequence of SEQ ID NO: 55 or SEQ ID NO: 56.

34. The recombinant polynucleotide of claim 29, wherein the recombinant polynucleotide comprises a sequence selected from SEQ ID NOs: 57-60.

35. A vector comprising the recombinant polynucleotide of any one of claims 27-32.

36. A cell comprising the recombinant polynucleotide of any one of claims 29-34 or the vector of claim 35.

37. A composition for restoring dystrophin function in a cell having a mutant dystrophin gene, or the composition comprising the system of any one of claims 1-28 or 30-33, or the recombinant polynucleotide of any one of claims 29-34, or the vector of claim 35.

38. A kit comprising the system of any one of claims 1-28 or 30-33, or the recombinant polynucleotide of any one of claims 29-34, or the vector of claim 35, or the composition of claim 35.

39. A method for restoring dystrophin function in a cell or a subject having a mutant dystrophin gene, the method comprising contacting the cell or the subject with the system of any one of claims 1-28 or 30-33, or the recombinant polynucleotide of any one of claims 29-34, or the vector of claim 35, or the composition of claim 37.

40. The method of claim 39, wherein the method results in a dystrophin gene that encodes an in-frame transcript comprising an exon 51 joined with an exon comprising a sequence of SEQ ID NO: 53 or SEQ ID NO: 55, and with an intron therebetween.

41. A method for restoring dystrophin function in a cell or a subject having a disrupted dystrophin gene caused by one or more deleted or mutated exons, the method comprising contacting the cell or the subject with the system of any one of claims 1-28 or 30-33, or the recombinant polynucleotide of any one of claims 29-34, or the vector of claim 35, or the composition of claim 37.

42. The method of claim 41, wherein the method results in a dystrophin gene that encodes an in-frame transcript comprising an exon 51 joined with an exon comprising a sequence of SEQ ID NO: 53 or SEQ ID NO: 55, and with an intron therebetween.

43. The method of claim 41 or 42, wherein dystrophin function is restored by inserting one or more wild-type exons of dystrophin gene corresponding to the one or more deleted or mutated exons.

44. The method of any one of claims 39-43, wherein the subject is suffering from Duchenne Muscular Dystrophy.

45. A genome editing system for correcting a dystrophin gene, the system comprising a donor sequence comprising exons 52-79 or exons 45-79 of the wild-type dystrophin gene.

46. The genome editing system of claim 45, further comprising a nuclease selected from homing endonuclease, zinc finger nuclease, TALEN, and Cas protein.

The application's sequence listing, which the Patent Office published only in electronic form, follows.

SEQUENCE LISTING (184 sequences)

SEQ ID NO: 1 - DNA, 3 bp, Artificial Sequence
  Synthetic
  misc_feature (1)..(1): n is a, c, g, or t
  misc_feature (2)..(2): r is a, or g
nrg

SEQ ID NO: 2 - DNA, 3 bp, Artificial Sequence
  Synthetic
  misc_feature (1)..(1): n is a, c, g, or t
ngg

SEQ ID NO: 3 - DNA, 3 bp, Artificial Sequence
  Synthetic
  misc_feature (1)..(1): n is a, c, g, or t
nag

SEQ ID NO: 4 - DNA, 5 bp, Artificial Sequence
  Synthetic
  misc_feature (1)..(1): n is a, c, g, or t
  misc_feature (4)..(4): n is a, c, g, or t
nggng

SEQ ID NO: 5 - DNA, 7 bp, Artificial Sequence
  Synthetic
  misc_feature (1)..(2): n is a, c, g, or t
  misc_feature (7)..(7): w is a, or t
nnagaaw

SEQ ID NO: 6 - DNA, 4 bp, Artificial Sequence
  Synthetic
  misc_feature (1)..(1): n is a, c, g, or t
  misc_feature (4)..(4): r is a, or g
naar

SEQ ID NO: 7 - DNA, 5 bp, Artificial Sequence
  Synthetic
  misc_feature (1)..(2): n is a, c, g, or t
  misc_feature (4)..(5): r is a, or g
nngrr

SEQ ID NO: 8 - DNA, 6 bp, Artificial Sequence
  Synthetic
  misc_feature (1)..(2): n is a, c, g, or t
  misc_feature (4)..(5): r is a, or g
  misc_feature (6)..(6): n is a, c, g, or t
nngrrn

SEQ ID NO: 9 - DNA, 6 bp, Artificial Sequence
  Synthetic
  misc_feature (1)..(2): n is a, c, g, or t
  misc_feature (4)..(5): r is a, or g
nngrrt

SEQ ID NO: 10 - DNA, 6 bp, Artificial Sequence
  Synthetic
  misc_feature (1)..(2): n is a, c, g, or t
  misc_feature (4)..(5): r is a, or g
  misc_feature (6)..(6): v is a, c, or g
nngrrv

SEQ ID NO: 11 - DNA, 8 bp, Artificial Sequence
  Synthetic
  misc_feature (1)..(4): n is a, c, g, or t
nnnngatt

SEQ ID NO: 12 - DNA, 8 bp, Artificial Sequence
  Synthetic
  misc_feature (1)..(4): n is a, c, g, or t
  misc_feature (6)..(8): n is a, c, g, or t
nnnngnnn

SEQ ID NO: 13 - DNA, 3 bp, Artificial Sequence
  Synthetic
  misc_feature (1)..(1): n is a, c, g, or t
nga

SEQ ID NO: 14 - DNA, 6 bp, Artificial Sequence
  Synthetic
  misc_feature (1)..(3): n is a, c, g, or t
  misc_feature (4)..(5): r is a, or g
nnnrrt

SEQ ID NO: 15 - DNA, 6 bp, Artificial Sequence
  Synthetic
attcct

SEQ ID NO: 16 - DNA, 4 bp, Artificial Sequence
  Synthetic
  misc_feature (1)..(1): n is a, c, g, or t
  misc_feature (4)..(4): n is a, c, g, or t
ngan

SEQ ID NO: 17 - DNA, 4 bp, Artificial Sequence
  Synthetic
  misc_feature (1)..(1): n is a, c, g, or t
  misc_feature (3)..(3): n is a, c, g, or t
ngng

SEQ ID NO: 18 - protein, 1368 aa, Streptococcus pyogenes [sequence omitted]

SEQ ID NO: 19 - protein, 1053 aa, Staphylococcus aureus
MKRNYILGLDIGITSVGYGIIDYETRDVIDAGVRLFKEANVENNEGRRSKRGARRLKRRRRHRIQRVKKLLFDYNLLTDHSELSGINPYEARVKGLSQKLSEEEFSAALLHLAKRRGVHNVNEVEEDTGNELSTKEQISRNSKALEEKYVAELQLERLKKDGEVRGSINRFKTSDYVKEAKQLLKVQKAYHQLDQSFIDTYIDLLETRRTYYEGPGEGSPFGWKDIKEWYEMLMGHCTYFPEELRSVKYAYNADLYNALNDLNNLVITRDENEKLEYYEKFQIIENVFKQKKKPTLKQIAKEILVNEEDIKGYRVTSTGKPEFTNLKVYHDIKDITARKEIIENAELLDQIAKILTIYQSSEDIQEELTNLNSELTQEEIEQISNLKGYTGTHNLSLKAINLILDELWHTNDNQIAIFNRLKLVPKKVDLSQQKEIPTTLVDDFILSPVVKRSFIQSIKVINAIIKKYGLPNDIIIELAREKNSKDAQKMINEMQKRNRQTNERIEEIIRTTGKENAKYLIEKIKLHDMQEGKCLYSLEAIPLEDLLNNPFNYEVDHIIPRSVSFDNSFNNKVLVKQEENSKKGNRTPFQYLSSSDSKISYETFKKHILNLAKGKGRISKTKKEYLLEERDINRFSVQKDFINRNLVDTRYATRGLMNLLRSYFRVNNLDVKVKSINGGFTSFLRRKWKFKKERNKGYKHHAEDALIIANADFIFKEWKKLDKAKKVMENQMFEEKQAESMPEIETEQEYKEIFITPHQIKHIKDFKDYKYSHRVDKKPNRELINDTLYSTRKDDKGNTLIVNNLNGLYDKDNDKLKKLINKSPEKLLMYHHDPQTYQKLKLIMEQYGDEKNPLYKYYEETGNYLTKYSKKDNGPVIKKIKYYGNKLNAHLDITDDYPNSRNKVVKLSLKPYRFDVYLDNGVYKFVTVKNLDVIKKENYYEVNSKCYEEAKKLKKISNQAEFIASFYNNDLIKINGELYRVIGVNNDLLNRIEVNMIDITYREYLENMNDKRPPRIIKTIASKTQSIKKYSTDILGNLYEVKSKKHPQIIKKG

SEQ ID NO: 20 - DNA, 4107 bp, Artificial Sequence
  Synthetic
atggataaaaagtacagcatcgggctggacatcggtacaaactcagtggggtgggccgtgattacggacgagtacaaggtaccctccaaaaaatttaaagtgctgggtaacacggacagacactctataaagaaaaatcttattggagccttgctgttcgactcaggcgagacagccgaagccacaaggttgaagcggaccgccaggaggcggtataccaggagaaagaaccgcatatgctacctgcaagaaatcttcagtaacgagatggcaaaggttgacgatagctttttccatcgcctggaagaatcctttcttgttgaggaagacaagaagcacgaacggcaccccatctttggcaatattgtcgacgaagtggcatatcacgaaaagtacccgactatctaccacctcaggaagaagctggtggactctaccgataaggcggacctcagacttatttatttggcactcgcccacatgattaaatttagaggacatttcttgatcgagggcgacctgaacccggacaacagtgacgtcgataagctgttcatccaacttgtgcagacctacaatcaactgttcgaagaaaaccctataaatgcttcaggagtcgacgctaaagcaatcctgtccgcgcgcctctcaaaatctagaagacttgagaatctgattgctcagttgcccggggaaaagaaaaatggattgtttggcaacctgatcgccctcagtctcggactgaccccaaatttcaaaagtaacttcgacctggccgaagacgctaagctccagctgtccaaggacacatacgatgacgacctcgacaatctgctggcccagattggggatcagtacgccgatctctttttggcagcaaagaacctgtccgacgccatcctgttgagcgatatcttgagagtgaacaccgaaattactaaagcaccccttagcgcatctatgatcaagcggtacgacgagcatcatcaggatctgaccctgctgaaggctcttgtgaggcaacagctccccgaaaaatacaaggaaatcttctttgaccagagcaaaaacggctacgctggctatatagatggtggggccagtcaggaggaattctataaattcatcaagcccattctcgagaaaatggacggcacagaggagttgctggtcaaacttaacagggaggacctgctgcggaagcagcggacctttgacaacgggtctatcccccaccagattcatctgggcgaactgcacgcaatcctgaggaggcaggaggatttttatccttttcttaaagataaccgcgagaaaatagaaaagattcttacattcaggatcccgtactacgtgggacctctcgcccggggcaattcacggtttgcctggatgacaaggaagtcagaggagactattacaccttggaacttcgaagaagtggtggacaagggtgcatctgcccagtctttcatcgagcggatgacaaattttgacaagaacctccctaatgagaaggtgctgcccaaacattctctgctctacgagtactttaccgtctacaatgaactgactaaagtcaagtacgtcaccgagggaatgaggaagccggcattccttagtggagaacagaagaaggcgattgtagacctgttgttcaagaccaacaggaaggtgactgtgaagcaacttaaagaagactactttaagaagatcgaatgttttgacagtgtggaaatttcaggggttgaagaccgcttcaatgcgtcattggggacttaccatgatcttctcaagatcataaaggacaaagacttcctggacaacgaagaaaatgaggatattctcgaagacatcgtcctcaccctgaccctgttcgaagacagggaaatgatagaagagcgcttgaaaacctatgcccacctcttcgacgataaagttatgaagcagctgaagcgcaggagatacacaggatggggaagattgtcaaggaagctgatcaatggaattagggataaacagagtggcaagaccatactggatttcctcaaatctgatggcttcgccaataggaacttcatgcaactgattcacgatgactctcttaccttcaaggaggacattcaaaaggctcaggtgagcgggcagggagactcccttcatgaacacatcgcgaatttggcaggttcccccgctattaaaaagggcatccttcaaactgtcaaggtggtggatgaattggtcaaggtaatgggcagacataagccagaaaatattgtgatcgagatggcccgcgaaaaccagaccacacagaagggccagaaaaatagtagagagcggatgaagaggatcgaggagggcatcaaagagctgggatctcagattctcaaagaacaccccgtagaaaacacacagctgcagaacgaaaaattgtacttgtactatctgcagaacggcagagacatgtacgtcgaccaagaacttgatattaatagactgtccgactatgacgtagaccatatcgtgccccagtccttcctgaaggacgactccattgataacaaagtcttgacaagaagcgacaagaacaggggtaaaagtgataatgtgcctagcgaggaggtggtgaaaaaaatgaagaactactggcgacagctgcttaatgcaaagctcattacacaacggaagttcgataatctgacgaaagcagagagaggtggcttgtctgagttggacaaggcagggtttattaagcggcagctggtggaaactaggcagatcacaaagcacgtggcgcagattttggacagccggatgaacacaaaatacgacgaaaatgataaactgatacgagaggtcaaagttatcacgctgaaaagcaagctggtgtccgattttcggaaagacttccagttctacaaagttcgcgagattaataactaccatcatgctcacgatgcgtacctgaacgctgttgtcgggaccgccttgataaagaagtacccaaagctggaatccgagttcgtatacggggattacaaagtgtacgatgtgaggaaaatgatagccaagtccgagcaggagattggaaaggccacagctaagtacttcttttattctaacatcatgaatttttttaagacggaaattaccctggccaacggagagatcagaaagcggccccttatagagacaaatggtgaaacaggtgaaatcgtctgggataagggcagggatttcgctactgtgaggaaggtgctgagtatgccacaggtaaatatcgtgaaaaaaaccgaagtacagaccggaggattttccaaggaaagcattttgcctaaaagaaactcagacaagctcatcgcccgcaagaaagattgggaccctaagaaatacgggggatttgactcacccaccgtagcctattctgtgctggtggtagctaaggtggaaaaaggaaagtctaagaagctgaagtccgtgaaggaactcttgggaatcactatcatggaaagatcatcctttgaaaagaaccctatcgatttcctggaggctaagggttacaaggaggtcaagaaagacctcatcattaaactgccaaaatactctctcttcgagctggaaaatggcaggaagagaatgttggccagcgccggagagctgcaaaagggaaacgagcttgctctgccctccaaatatgttaattttctctatctcgcttcccactatgaaaagctgaaagggtctcccgaagataacgagcagaagcagctgttcgtcgaacagcacaagcactatctggatgaaataatcgaacaaataagcgagttcagcaaaagggttatcctggcggatgctaatttggacaaagtactgtctgcttataacaagcaccgggataagcctattagggaacaagccgagaatataattcacctctttacactcacgaatctcggagcccccgccgccttcaaatactttgatacgactatcgaccggaaacggtataccagtaccaaagaggtcctcgatgccaccctcatccaccagtcaattactggcctgtacgaaacacggatcgacctctctcaactgggcggcgactag

SEQ ID NO: 21 - DNA, 3158 bp, Artificial Sequence
  Synthetic
atgaaaaggaactacattctggggctggacatcgggattacaagcgtggggtatgggattattgactatgaaacaagggacgtgatcgacgcaggcgtcagactgttcaaggaggccaacgtggaaaacaatgagggacggagaagcaagaggggagccaggcgcctgaaacgacggagaaggcacagaatccagagggtgaagaaactgctgttcgattacaacctgctgaccgaccattctgagctgagtggaattaatccttatgaagccagggtgaaaggcctgagtcagaagctgtcagaggaagagttttccgcagctctgctgcacctggctaagcgccgaggagtgcataacgtcaatgaggtggaagaggacaccggcaacgagctgtctacaaaggaacagatctcacgcaatagcaaagctctggaagagaagtatgtcgcagagctgcagctggaacggctgaagaaagatggcgaggtgagagggtcaattaataggttcaagacaagcgactacgtcaaagaagccaagcagctgctgaaagtgcagaaggcttaccaccagctggatcagagcttcatcgatacttatatcgacctgctggagactcggagaacctactatgagggaccaggagaagggagccccttcggatggaaagacatcaaggaatggtacgagatgctgatgggacattgcacctattttccagaagagctgagaagcgtcaagtacgcttataacgcagatctgtacaacgccctgaatgacctgaacaacctggtcatcaccagggatgaaaacgagaaactggaatactatgagaagttccagatcatcgaaaacgtgtttaagcagaagaaaaagcctacactgaaacagattgctaaggagatcctggtcaacgaagaggacatcaagggctaccgggtgacaagcactggaaaaccagagttcaccaatctgaaagtgtatcacgatattaaggacatcacagcacggaaagaaatcattgagaacgccgaactgctggatcagattgctaagatcctgactatctaccagagctccgaggacatccaggaagagctgactaacctgaacagcgagctgacccaggaagagatcgaacagattagtaatctgaaggggtacaccggaacacacaacctgtccctgaaagctatcaatctgattctggatgagctgtggcatacaaacgacaatcagattgcaatctttaaccggctgaagctggtcccaaaaaaggtggacctgagtcagcagaaagagatcccaaccacactggtggacgatttcattctgtcacccgtggtcaagcggagcttcatccagagcatcaaagtgatcaacgccatcatcaagaagtacggcctgcccaatgatatcattatcgagctggctagggagaagaacagcaaggacgcacagaagatgatcaatgagatgcagaaacgaaaccggcagaccaatgaacgcattgaagagattatccgaactaccgggaaagagaacgcaaagtacctgattgaaaaaatcaagctgcacgatatgcaggagggaaagtgtctgtattctctggaggcctccccctggaggacctgctgaacaatccattcaactacgaggtcgatcatattatccccagaagcgtgtccttcgacaattcctttaacaacaaggtgctggtcaagcaggaagagaactctaaaaagggcaataggactcctttccagtacctgtctagttcagattccaagatctcttacgaaacctttaaaaagcacattctgaatctggccaaaggaaagggccgcatcagcaagaccaaaaaggagtacctgctggaagagcgggacatcaacagattctccgtccagaaggattttattaaccggaatctggtggacacaagatacgctactcgcggcctgatgaatctgctgcgatcctatttccgggtgaacaatctggatgtgaaagtcaagtccatcaacggcgggttcacatcttttctgaggcgcaaatggaagtttaaaaaggagcgcaacaaagggtacaagcaccatgccgaagatgctctgattatcgcaaatgccgacttcatctttaaggagtggaaaaagctggacaaagccaagaaagtgatggagaaccagatgttcgaagagaagcaggccgaatctatgcccgaaatcgagacagaacaggagtacaaggagattttcatcactcctcaccagatcaagcatatcaaggatttcaaggactacaagtactctcaccgggtggataaaaagcccaacagagagctgatcaatgacaccctgtatagtacaagaaaagacgataaggggaataccctgattgtgaacaatctgaacggactgtacgacaaagataatgacaagctgaaaaagctgatcaacaaaagtcccgagaagctgctgatgtaccaccatgatcctcagacatatcagaaactgaagctgattatggagcagtacggcgacgagaagaacccactgtataagtactatgaagagactgggaactacctgaccaagtatagcaaaaaggataatggccccgtgatcaagaagatcaagtactatgggaacaagctgaatgcccatctggacatcacagacgattaccctaacagtcgcaacaaggtggtcaagctgtcactgaagccatacagattcgatgtctatctggacaacggcgtgtataaatttgtgactgtcaagaatctggatgtcatcaaaaaggagaactactatgaagtgaatagcaagtgctacgaagaggctaaaaagctgaaaaagattagcaaccaggcagagttcatcgcctccttttacaacaacgacctgattaagatcaatggcgaactgtatagggtcatcggggtgaacaatgatctgctgaaccgcattgaagtgaatatgattgacatcacttaccgagagtatctggaaaacatgaatgataagcgcccccctcgaattatcaaaacaattgcctctaagactcagagtatcaaaaagtactcaaccgacattctgggaaacctgtatgaggtgaagagcaaaaagcaccctcagattatcaaaaagggc

SEQ ID NO: 22 - DNA, 3159 bp, Artificial Sequence
  Synthetic
atgaagcggaactacatcctgggcctggacatcggcatcaccagcgtgggctacggcatcatcgactacgagacacgggacgtgatcgatgccggcgtgcggctgttcaaagaggccaacgtggaaaacaacgagggcaggcggagcaagagaggcgccagaaggctgaagcggcggaggcggcatagaatccagagagtgaagaagctgctgttcgactacaacctgctgaccgaccacagcgagctgagcggcatcaacccctacgaggccagagtgaagggcctgagccagaagctgagcgaggaagagttctctgccgccctgctgcacctggccaagagaagaggcgtgcacaacgtgaacgaggtggaagaggacaccggcaacgagctgtccaccaaagagcagatcagccggaacagcaaggccctggaagagaaatacgtggccgaactgcagctggaacggctgaagaaagacggcgaagtgcggggcagcatcaacagattcaagaccagcgactacgtgaaagaagccaaacagctgctgaaggtgcagaaggcctaccaccagctggaccagagcttcatcgacacctacatcgacctgctggaaacccggcggacctactatgagggacctggcgagggcagccccttcggctggaaggacatcaaagaatggtacgagatgctgatgggccactgcacctacttccccgaggaactgcggagcgtgaagtacgcctacaacgccgacctgtacaacgccctgaacgacctgaacaatctcgtgatcaccagggacgagaacgagaagctggaatattacgagaagttccagatcatcgagaacgtgttcaagcagaagaagaagcccaccctgaagcagatcgccaaagaaatcctcgtgaacgaagaggatattaagggctacagagtgaccagcaccggcaagcccgagttcaccaacctgaaggtgtaccacgacatcaaggacattaccgcccggaaagagattattgagaacgccgagctgctggatcagattgccaagatcctgaccatctaccagagcagcgaggacatccaggaagaactgaccaatctgaactccgagctgacccaggaagagatcgagcagatctctaatctgaagggctataccggcacccacaacctgagcctgaaggccatcaacctgatcctggacgagctgtggcacaccaacgacaaccagatcgctatcttcaaccggctgaagctggtgcccaagaaggtggacctgtcccagcagaaagagatccccaccaccctggtggacgacttcatcctgagccccgtcgtgaagagaagcttcatccagagcatcaaagtgatcaacgccatcatcaagaagtacggcctgcccaacgacatcattatcgagctggcccgcgagaagaactccaaggacgcccagaaaatgatcaacgagatgcagaagcggaaccggcagaccaacgagcggatcgaggaaatcatccggaccaccggcaaagagaacgccaagtacctgatcgagaagatcaagctgcacgacatgcaggaaggcaagtgcctgtacagcctggaagccatccctctggaagatctgctgaacaaccccttcaactatgaggtggaccacatcatccccagaagcgtgtccttcgacaacagcttcaacaacaaggtgctcgtgaagcaggaagaaaacagcaagaagggcaaccggaccccattccagtacctgagcagcagcgacagcaagatcagctacgaaaccttcaagaagcacatcctgaatctggccaagggcaagggcagaatcagcaagaccaagaaagagtatctgctggaagaacgggacatcaacaggttctccgtgcagaaagacttcatcaaccggaacctggtggataccagatacgccaccagaggcctgatgaacctgctgcggagctacttcagagtgaacaacctggacgtgaaagtgaagtccatcaatggcggcttcaccagctttctgcggcggaagtggaagtttaagaaagagcggaacaaggggtacaagcaccacgccgaggacgccctgatcattgccaacgccgatttcatcttcaaagagtggaagaaactggacaaggccaaaaaagtgatggaaaaccagatgttcgaggaaaagcaggccgagagcatgcccgagatcgaaaccgagcaggagtacaaagagatcttcatcaccccccaccagatcaagcacattaaggacttcaaggactacaagtacagccaccgggtggacaagaagcctaatagagagctgattaacgacaccctgtactccacccggaaggacgacaagggcaacaccctgatcgtgaacaatctgaacggcctgtacgacaaggacaatgacaagctgaaaaagctgatcaacaagagccccgaaaagctgctgatgtaccaccacgacccccagacctaccagaaactgaagctgattatggaacagtacggcgacgagaagaatcccctgtacaagtactacgaggaaaccgggaactacctgaccaagtactccaaaaaggacaacggccccgtgatcaagaagattaagtattacggcaacaaactgaacgcccatctggacatcaccgacgactaccccaacagcagaaacaaggtcgtgaagctgtccctgaagccctacagattcgacgtgtacctggacaatggcgtgtacaagttcgtgaccgtgaagaatctggatgtgatcaaaaaagaaaactactacgaagtgaatagcaagtgctatgaggaagctaagaagctgaagaagatcagcaaccaggccgagtttatcgcctccttctacaacaacgatctgatcaagatcaacggcgagctgtatagagtgatcggcgtgaacaacgacctgctgaaccggatcgaagtgaacatgatcgacatcacctaccgcgagtacctggaaaacatgaacgacaagaggccccccaggatcattaagacaatcgcctccaagacccagagcattaagaagtacagcacagacattctgggcaacctgtatgaagtgaaatctaagaagcaccctcagatcatcaaaaagggc

SEQ ID NO: 23 - DNA, 3159 bp, Artificial Sequence
  Synthetic
atgaagcgcaactacatcctcggactggacatcggcattacctccgtgggatacggcatcatcgattacgaaactagggatgtgatcgacgctggagtcaggctgttcaaagaggcgaacgtggagaacaacgaggggcggcgctcaaagaggggggcccgccggctgaagcgccgccgcagacatagaatccagcgcgtgaagaagctgctgttcgactacaaccttctgaccgaccactccgaactttccggcatcaacccatatgaggctagagtgaagggattgtcccaaaagctgtccgaggaagagttctccgccgcgttgctccacctcgccaagcgcaggggagtgcacaatgtgaacgaagtggaagaagataccggaaacgagctgtccaccaaggagcagatcagccggaactccaaggccctggaagagaaatacgtggcggaactgcaactggagcggctgaagaaagacggagaagtgcgcggctcgatcaaccgcttcaagacctcggactacgtgaaggaggccaagcagctcctgaaagtgcaaaaggcctatcaccaacttgaccagtcctttatcgatacctacatcgatctgctcgagactcggcggacttactacgagggtccaggggagggctccccatttggttggaaggatattaaggagtggtacgaaatgctgatgggacactgcacatacttccctgaggagctgcggagcgtgaaatacgcatacaacgcagacctgtacaacgcgctgaacgacctgaacaatctcgtgatcacccgggacgagaacgaaaagctcgagtattacgaaaagttccagattattgagaacgtgttcaaacagaagaagaagccgacactgaagcagattgccaaggaaatcctcgtgaacgaagaggacatcaagggctatcgagtgacctcaacgggaaagccggagttcaccaatctgaaggtctaccacgacatcaaagacattaccgcccggaaggagatcattgagaacgcggagctgttggaccagattgcgaagattctgaccatctaccaatcctccgaggatattcaggaagaactcaccaacctcaacagcgaactgacccaggaggagatagagcaaatctccaacctgaagggctacaccggaactcataacctgagcctgaaggccatcaacttgatcctggacgagctgtggcacaccaacgataaccagatcgctattttcaatcggctgaagctggtccccaagaaagtggacctctcacaacaaaaggagatccctactacccttgtggacgatttcattctgtcccccgtggtcaagagaagcttcatacagtcaatcaaagtgatcaatgccattatcaagaaatacggtctgcccaacgacattatcattgagctcgcccgcgagaagaactcgaaggacgcccagaagatgattaacgaaatgcagaagaggaaccgacagactaacgaacggatcgaagaaatcatccggaccaccgggaaggaaaacgcgaagtacctgatcgaaaagatcaagctccatgacatgcaggaaggaaagtgtctgtactcgctggaggccattccgctggaggacttgctgaacaacccttttaactacgaagtggatcatatcattccgaggagcgtgtcattcgacaattccttcaacaacaaggtcctcgtgaagcaggaggaaaactcgaagaagggaaaccgcacgccgttccagtacctgagcagcagcgactccaagatttcctacgaaaccttcaagaagcacatcctcaacctggcaaaggggaagggtcgcatctccaagaccaagaaggaatatctgctggaagaaagagacatcaacagattctccgtgcaaaaggacttcatcaaccgcaacctcgtggatactagatacgctactcggggtctgatgaacctcctgagaagctactttagagtgaacaatctggacgtgaaggtcaagtcgattaacggaggtttcacctccttcctgcggcgcaagtggaagttcaagaaggaacggaacaagggctacaagcaccacgccgaggacgccctgatcattgccaacgccgacttcatcttcaaagaatggaagaaacttgacaaggctaagaaggtcatggaaaaccagatgttcgaagaaaagcaggccgagtctatgcctgaaatcgagactgaacaggagtacaaggaaatctttattacgccacaccagatcaaacacatcaaggatttcaaggattacaagtactcacatcgcgtggacaaaaagccgaacagggaactgatcaacgacaccctctactccacccggaaggatgacaaagggaataccctcatcgtcaacaaccttaacggcctgtacgacaaggacaacgataagctgaagaagctcattaacaagtcgcccgaaaagttgctgatgtaccaccacgaccctcagacttaccagaagctcaagctgatcatggagcagtatggggacgagaaaaacccgttgtacaagtactacgaagaaactgggaattatctgactaagtactccaagaaagataacggccccgtgattaagaagattaagtactacggcaacaagctgaacgcccatctggacatcaccgatgactaccctaattcccgcaacaaggtcgtcaagctgagcctcaagccctaccggtttgatgtgtaccttgacaatggagtgtacaagttcgtgactgtgaagaaccttgacgtgatcaagaaggagaactactacgaagtcaactccaagtgctacgaggaagcaaagaagttgaagaagatctcgaaccaggccgagttcattgcctccttctataacaacgacctgattaagatcaacggcgaactgtaccgcgtcattggcgtgaacaacgatctcctgaaccgcatcgaagtgaacatgatcgacatcacttaccgggaatacctggagaatatgaacgacaagcgcccgccccggatcattaagactatcgcctcaaagacccagtcgatcaagaagtacagcaccgacatcctgggcaacctgtacgaggtcaaatcgaagaagcacccccagatcatcaagaaggga

SEQ ID NO: 24 - DNA, 3255 bp, Artificial Sequence
  Synthetic
atggccccaaagaagaagcggaaggtcggtatccacggagtcccagcagccaagcggaactacatcctgggcctggacatcggcatcaccagcgtgggctacggcatcatcgactacgagacacgggacgtgatcgatgccggcgtgcggctgttcaaagaggccaacgtggaaaacaacgagggcaggcggagcaagagaggcgccagaaggctgaagcggcggaggcggcatagaatccagagagtgaagaagctgctgttcgactacaacctgctgaccgaccacagcgagctgagcggcatcaacccctacgaggccagagtgaagggcctgagccagaagctgagcgaggaagagttctctgccgccctgctgcacctggccaagagaagaggcgtgcacaacgtgaacgaggtggaagaggacaccggcaacgagctgtccaccagagagcagatcagccggaacagcaaggccctggaagagaaatacgtggccgaactgcagctggaacggctgaagaaagacggcgaagtgcggggcagcatcaacagattcaagaccagcgactacgtgaaagaagccaaacagctgctgaaggtgcagaaggcctaccaccagctggaccagagcttcatcgacacctacatcgacctgctggaaacccggcggacctactatgagggacctggcgagggcagccccttcggctggaaggacatcaaagaatggtacgagatgctgatgggccactgcacctacttccccgaggaactgcggagcgtgaagtacgcctacaacgccgacctgtacaacgccctgaacgacctgaacaatctcgtgatcaccagggacgagaacgagaagctggaatattacgagaagttccagatcatcgagaacgtgttcaagcagaagaagaagcccaccctgaagcagatcgccaaagaaatcctcgtgaacgaagaggatattaagggctacagagtgaccagcaccggcaagcccgagttcaccaacctgaaggtgtaccacgacatcaaggacattaccgcccggaaagagattattgagaacgccgagctgctggatcagattgccaagatcctgaccatctaccagagcagcgaggacatccaggaagaactgaccaatctgaactccgagctgacccaggaagagatcgagcagatctctaatctgaagggctataccggcacccacaacctgagcctgaaggccatcaacctgatcctggacgagctgtggcacaccaacgacaaccagatcgctatcttcaaccggctgaagctggtgcccaagaaggtggacctgtcccagcagaaagagatccccaccaccctggtggacgacttcatcctgagccccgtcgtgaagagaagcttcatccagagcatcaaagtgatcaacgccatcatcaagaagtacggcctgcccaacgacatcattatcgagctggcccgcgagaagaactccaaggacgcccagaaaatgatcaacgagatgcagaagcggaaccggcagaccaacgagcggatcgaggaaatcatccggaccaccggcaaagagaacgccaagtacctgatcgagaagatcaagctgcacgacatgcaggaaggcaagtgcctgtacagcctggaagccatccctctggaagatctgctgaacaaccccttcaactatgaggtggaccacatcatccccagaagcgtgtccttcgacaacagcttcaacaacaaggtgctcgtgaagcaggaagaaaacagcaagaagggcaaccggaccccattccagtacctgagcagcagcgacagcaagatcagctacgaaaccttcaagaagcacatcctgaatctggccaagggcaagggcagaatcagcaagaccaagaaagagtatctgctggaagaacgggacatcaacaggttctccgtgcagaaagacttcatcaaccggaacctggtggataccagatacgccaccagaggcctgatgaacctgctgcggagctacttcagagtgaacaacctggacgtgaaagtgaagtccatcaatggcggcttcaccagctttctgcggcggaagtggaagtttaagaaagagcggaacaaggggtacaagcaccacgccgaggacgccctgatcattgccaacgccgatttcatcttcaaagagtggaagaaactggacaaggccaaaaaagtgatggaaaaccagatgttcgaggaaaggcaggccgagagcatgcccgagatcgaaaccgagcaggagtacaaagagatcttcatcaccccccaccagatcaagcacattaaggacttcaaggactacaagtacagccaccgggtggacaagaagcctaatagagagctgattaacgacaccctgtactccacccggaaggacgacaagggcaacaccctgatcgtgaacaatctgaacggcctgtacgacaaggacaatgacaagctgaaaaagctgatcaacaagagccccgaaaagctgctgatgtaccaccacgacccccagacctaccagaaactgaagctgattatggaacagtacggcgacgagaagaatcccctgtacaagtactacgaggaaaccgggaactacctgaccaagtactccaaaaaggacaacggccccgtgatcaagaagattaagtattacggcaacaaactgaacgcccatctggacatcaccgacgactaccccaacagcagaaacaaggtcgtgaagctgtccctgaagccctacagattcgacgtgtacctggacaatggcgtgtacaagttcgtgaccgtgaagaatctggatgtgatcaaaaaagaaaactactacgaagtgaatagcaagtgctatgaggaagctaagaagctgaagaagatcagcaaccaggccgagtttatcgcctccttctacaacaacgatctgatcaagatcaacggcgagctgtatagagtgatcggcgtgaacaacgacctgctgaaccggatcgaagtgaacatgatcgacatcacctaccgcgagtacctggaaaacatgaacgacaagaggccccccaggatcattaagacaatcgcctccaagacccagagcattaagaagtacagcacagacattctgggcaacctgtatgaagtgaaatctaagaagcaccctcagatcatcaaaaagggcaaaaggccggcggccacgaaaaaggccggccaggcaaaaaagaaaaag

SEQ ID NO: 25 - DNA, 3239 bp, Artificial Sequence
  Synthetic
accggtgccaccatgtacccatacgatgttccagattacgcttcgccgaagaaaaagcgcaaggtcgaagcgtccatgaaaaggaactacattctggggctggacatcgggattacaagcgtggggtatgggattattgactatgaaacaagggacgtgatcgacgcaggcgtcagactgttcaaggaggccaacgtggaaaacaatgagggacggagaagcaagaggggagccaggcgcctgaaacgacggagaaggcacagaatccagagggtgaagaaactgctgttcgattacaacctgctgaccgaccattctgagctgagtggaattaatccttatgaagccagggtgaaaggcctgagtcagaagctgtcagaggaagagttttccgcagctctgctgcacctggctaagcgccgaggagtgcataacgtcaatgaggtggaagaggacaccggcaacgagctgtctacaaaggaacagatctcacgcaatagcaaagctctggaagagaagtatgtcgcagagctgcagctggaacggctgaagaaagatggcgaggtgagagggtcaattaataggttcaagacaagcgactacgtcaaagaagccaagcagctgctgaaagtgcagaaggcttaccaccagctggatcagagcttcatcgatacttatatcgacctgctggagactcggagaacctactatgagggaccaggagaagggagccccttcggatggaaagacatcaaggaatggtacgagatgctgatgggacattgcacctattttccagaagagctgagaagcgtcaagtacgcttataacgcagatcttacaacgccctgaatgacctgaacaacctggtcatcaccagggatgaaaacgagaaactggaatactatgagaagttccagatcatcgaaaacgtgtttaagcagaagaaaaagcctacactgaaacagattgctaaggagatcctggtcaacgaagaggacatcaagggctaccgggtgacaagcactggaaaaccagagttcaccaatctgaaagtgtatcacgatattaaggacatcacagcacggaaagaaatcattgagaacgccgaactgctggatcagattgctaagatcctgactatctaccagagctccgaggacatccaggaagagctgactaacctgaacagcgagctgacccaggaagagatcgaacagattagtaatctgaaggggtacaccggaacacacaacctgtccctgaaagctatcaatctgattctggatgagctgtggcatacaaacgacaatcagattgcaatctttaaccggctgaagctggtcccaaaaaaggtggacctgagtcagcagaaagagatcccaaccacactggtggacgatttcattctgtcacccgtggtcaagcggagcttcatccagagcatcaaagtgatcaacgccatcatcaagaagtacggcctgcccaatgatatcattatcgagctggctagggagaagaacagcaaggacgcacagaagatgatcaatgagatgcagaaacgaaaccggcagaccaatgaacgcattgaagagattatccgaactaccgggaaagagaacgcaaagtacctgattgaaaaaatcaagctgcacgatatgcaggagggaaagtgtctgtattctctggaggccatccccctggaggacctgctgaacaatccattcaactacgaggtcgatcatattatccccagaagcgtgtccttcgacaattcctttaacaacaaggtgctggtcaagcaggaagagaactctaaaaagggcaataggactcctttccagtacctgtctagttcagattccaagatctcttacgaaacctttaaaaagcacattctgaatctggccaaaggaaagggccgcatcagcaagaccaaaaaggagtacctgctggaagagcgggacatcaacagattctccgtccagaaggattttattaaccggaatctggtggacacaagatacgctactcgcggcctgatgaatctgctgcgatcctatttccgggtgaacaatctggatgtgaaagtcaagtccatcaacggcgggttcacatcttttctgaggcgcaaatggaagtttaaaaaggagcgcaacaaagggtacaagcaccatgccgaagatgctctgattatcgcaaatgccgacttcatctttaaggagtggaaaaagctggacaaagccaagaaagtgatggagaaccagatgttcgaagagaagcaggccgaatctatgcccgaaatcgagacagaacaggagtacaaggagattttcatcactcctcaccagatcaagcatatcaaggatttcaaggactacaagtactctcaccgggtggataaaaagcccaacagagagctgatcaatgacaccctgtatagtacaagaaaagacgataaggggaataccctgattgtgaacaatctgaacggactgtacgacaaagataatgacaagctgaaaaagctgatcaacaaaagtcccgagaagctgctgatgtaccaccatgatcctcagacatatcagaaactgaagctgattatggagcagtacggcgacgagaagaacccactgtataagtactatgaagagactgggaactacctgaccaagtatagcaaaaaggataatggccccgtgatcaagaagatcaagtactatgggaacaagctgaatgcccatctggacatcacagacgattaccctaacagtcgcaacaaggtggtcaagctgtcactgaagccatacagattcgatgtctatctggacaacggcgtgtataaatttgtgactgtcaagaatctggatgtcatcaaaaaggagaactactatgaagtgaatagcaagtgctacgaagaggctaaaaagctgaaaaagattagcaaccaggcagagttcatcgcctccttttacaacaacgacctgattaagatcaatggcgaactgtatagggtcatcggggtgaacaatgatctgctgaaccgcattgaagtgaatatgattgacatcacttaccgagagtatctggaaaacatgaatgataagcgcccccctcgaattatcaaaacaattgcctctaagactcagagtatcaaaaagtactcaaccgacattctgggaaacctgtatgaggtgaagagcaaaaagcaccctcagattatcaaaaagggctaagaa

SEQ ID NO: 26 - DNA, 3255 bp, Artificial Sequence
  Synthetic
atggccccaaagaagaagcggaaggtcggtatccacggagtcccagcagccaagcggaactacatcctgggcctggacatcggcatcaccagcgtgggctacggcatcatcgactacgagacacgggacgtgatcgatgccggcgtgcggctgttcaaagaggccaacgtggaaaacaacgagggcaggcggagcaagagaggcgccagaaggctgaagcggcggaggcggcatagaatccagagagtgaagaagctgctgttcgactacaacctgctgaccgaccacagcgagctgagcggcatcaacccctacgaggccagagtgaagggcctgagccagaagctgagcgaggaagagttctctgccgccctgctgcacctggccaagagaagaggcgtgcacaacgtgaacgaggtggaagaggacaccggcaacgagctgtccaccaaagagcagatcagccggaacagcaaggccctggaagagaaatacgtggccgaactgcagctggaacggctgaagaaagacggcgaagtgcggggcagcatcaacagattcaagaccagcgactacgtgaaagaagccaaacagctgctgaaggtgcagaaggcctaccaccagctggaccagagcttcatcgacacctacatcgacctgctggaaacccggcggacctactatgagggacctggcgagggcagccccttcggctggaaggacatcaaagaatggtacgagatgctgatgggccactgcacctacttccccgaggaactgcggagcgtgaagtacgcctacaacgccgacctgtacaacgccctgaacgacctgaacaatctcgtgatcaccagggacgagaacgagaagctggaatattacgagaagttccagatcatcgagaacgtgttcaagcagaagaagaagcccaccctgaagcagatcgccaaagaaatcctcgtgaacgaagaggatattaagggctacagagtgaccagcaccggcaagcccgagttcaccaacctgaaggtgtaccacgacatcaaggacattaccgcccggaaagagattattgagaacgccgagctgctggatcagattgccaagatcctgaccatctaccagagcagcgaggacatccaggaagaactgaccaatctgaactccgagctgacccaggaagagatcgagcagatctctaatctgaagggctataccggcacccacaacctgagcctgaaggccatcaacctgatcctggacgagctgtggcacaccaacgacaaccagatcgctatcttcaaccggctgaagctggtgcccaagaaggtggacctgtcccagcagaaagagatccccaccaccctggtggacgacttcatcctgagccccgtcgtgaagagaagcttcatccagagcatcaaagtgatcaacgccatcatcaagaagtacggcctgcccaacgacatcattatcgagctggcccgcgagaagaactccaaggacgcccagaaaatgatcaacgagatgcagaagcggaaccggcagaccaacgagcggatcgaggaaatcatccggaccaccggcaaagagaacgccaagtacctgatcgagaagatcaagctgcacgacatgcaggaaggcaagtgcctgtacagcctggaagccatccctctggaagatctgctgaacaaccccttcaactatgaggtggaccacatcatccccagaagcgtgtccttcgacaacagcttcaacaacaaggtgctcgtgaagcaggaagaaaacagcaagaagggcaaccggaccccattccagtacctgagcagcagcgacagcaagatcagctacgaaaccttcaagaagcacatcctgaatctggccaagggcaagggcagaatcagcaagaccaagaaagagtatctgctggaagaacgggacatcaacaggttctccgtgcagaaagacttcatcaaccggaacctggtggataccagatacgccaccagaggcctgatgaacctgctgcggagctacttcagagtgaacaacctggacgtgaaagtgaagtccatcaatggcggcttcaccagctttctgcggcggaagtggaagtttaagaaagagcggaacaaggggtacaagcaccacgccgaggacgccctgatcattgccaacgccgatttcatcttcaaagagtggaagaaactggacaaggccaaaaaagtgatggaaaaccagatgttcgaggaaaagcaggccgagagcatgcccgagatcgaaaccgagcaggagtacaaagagatcttcatcaccccccaccagatcaagcacattaaggacttcaaggactacaagtacagccaccgggtggacaagaagcctaatagagagctgattaacgacaccctgtactccacccggaaggacgacaagggcaacaccctgatcgtgaacaatctgaacggcctgtacgacaaggacaatgacaagctgaaaaagctgatcaacaagagccccgaaaagctgctgatgtaccaccacgacccccagacctaccagaaactgaagctgattatggaacagtacggcgacgagaagaatcccctgtacaagtactacgaggaaaccgggaactacctgaccaagtactccaaaaaggacaacggccccgtgatcaagaagattaagtattacggcaacaaactgaacgcccatctggacatcaccgacgactaccccaacagcagaaacaaggtcgtgaagctgtccctgaagccctacagattcgacgtgtacctggacaatggcgtgtacaagttcgtgaccgtgaagaatctggatgtgatcaaaaaagaaaactactacgaagtgaatagcaagtgctatgaggaagctaagaagctgaagaagatcagcaaccaggccgagtttatcgcctccttctacaacaacgatctgatcaagatcaacggcgagctgtatagagtgatcggcgtgaacaacgacctgctgaaccggatcgaagtgaacatgatcgacatcacctaccgcgagtacctggaaaacatgaacgacaagaggccccccaggatcattaagacaatcgcctccaagacccagagcattaagaagtacagcacagacattctgggcaacctgtatgaagtgaaatctaagaagcaccctcagatcatcaaaaagggcaaaaggccggcggccacgaaaaaggccggccaggcaaaaaagaaaaag

SEQ ID NO: 27 - DNA, 3156 bp, Artificial Sequence
  Synthetic
aagcggaactacatcctgggcctggacatcggcatcaccagcgtgggctacggcatcatcgactacgagacacgggacgtgatcgatgccggcgtgcggctgttcaaagaggccaacgtggaaaacaacgagggcaggcggagcaagagaggcgccagaaggctgaagcggcggaggcggcatagaatccagagagtgaagaagctgctgttcgactacaacctgctgaccgaccacagcgagctgagcggcatcaacccctacgaggccagagtgaagggcctgagccagaagctgagcgaggaagagttctctgccgccctgctgcacctggccaagagaagaggcgtgcacaacgtgaacgaggtggaagaggacaccggcaacgagctgtccaccaaagagcagatcagccggaacagcaaggccctggaagagaaatacgtggccgaactgcagctggaacggctgaagaaagacggcgaagtgcggggcagcatcaacagattcaagaccagcgactacgtgaaagaagccaaacagctgctgaaggtgcagaaggcctaccaccagctggaccagagcttcatcgacacctacatcgacctgctggaaacccggcggacctactatgagggacctggcgagggcagccccttcggctggaaggacatcaaagaatggtacgagatgctgatgggccactgcacctacttccccgaggaactgcggagcgtgaagtacgcctacaacgccgacctgtacaacgccctgaacgacctgaacaatctcgtgatcaccagggacgagaacgagaagctggaatattacgagaagttccagatcatcgagaacgtgttcaagcagaagaagaagcccaccctgaagcagatcgccaaagaaatcctcgtgaacgaagaggatattaagggctacagagtgaccagcaccggcaagcccgagttcaccaacctgaaggtgtaccacgacatcaaggacattaccgcccggaaagagattattgagaacgccgagctgctggatcagattgccaagatcctgaccatctaccagagcagcgaggacatccaggaagaactgaccaatctgaactccgagctgacccaggaagagatcgagcagatctctaatctgaagggctataccggcacccacaacctgagcctgaaggccatcaacctgatcctggacgagctgtggcacaccaacgacaaccagatcgctatcttcaaccggctgaagctggtgcccaagaaggtggacctgtcccagcagaaagagatccccaccaccctggtggacgacttcatcctgagccccgtcgtgaagagaagcttcatccagagcatcaaagtgatcaacgccatcatcaagaagtacggcctgcccaacgacatcattatcgagctggcccgcgagaagaactccaaggacgcccagaaaatgatcaacgagatgcagaagcggaaccggcagaccaacgagcggatcgaggaaatcatccggaccaccggcaaagagaacgccaagtacctgatcgagaagatcaagctgcacgacatgcaggaaggcaagtgcctgtacagcctggaagccatccctctggaagatctgctgaacaaccccttcaactatgaggtggaccacatcatccccagaagcgtgtccttcgacaacagcttcaacaacaaggtgctcgtgaagcaggaagaaaacagcaagaagggcaaccggaccccattccagtacctgagcagcagcgacagcaagatcagctacgaaaccttcaagaagcacatcctgaatctggccaagggcaagggcagaatcagcaagaccaagaaagagtatctgctggaagaacgggacatcaacaggttctccgtgcagaaagacttcatcaaccggaacctggtggataccagatacgccaccagaggcctgatgaacctgctgcggagctacttcagagtgaacaacctggacgtgaaagtgaagtccatcaatggcggcttcaccagctttctgcggcggaagtggaagtttaagaaagagcggaacaaggggtacaagcaccacgccgaggacgccctgatcattgccaacgccgatttcatcttcaaagagtggaagaaactggacaaggccaaaaaagtgatggaaaaccagatgttcgaggaaaagcaggccgagagcatgcccgagatcgaaaccgagcaggagtacaaagagatcttcatcaccccccaccagatcaagcacattaaggacttcaaggactacaagtacagccaccgggtggacaagaagcctaatagagagctgattaacgacaccctgtactccacccggaaggacgacaagggcaacaccctgatcgtgaacaatctgaacggcctgtacgacaaggacaatgacaagctgaaaaagctgatcaacaagagccccgaaaagctgctgatgtaccaccacgacccccagacctaccagaaactgaagctgattatggaacagtacggcgacgagaagaatcccctgtacaagtactacgaggaaaccgggaactacctgaccaagtactccaaaaaggacaacggccccgtgatcaagaagattaagtattacggcaacaaactgaacgcccatctggacatcaccgacgactaccccaacagcagaaacaaggtcgtgaagctgtccctgaagccctacagattcgacgtgtacctggacaatggcgtgtacaagttcgtgaccgtgaagaatctggatgtgatcaaaaaagaaaactactacgaagtgaatagcaagtgctatgaggaagctaagaagctgaagaagatcagcaaccaggccgagtttatcgcctccttctacaacaacgatctgatcaagatcaacggcgagctgtatagagtgatcggcgtgaacaacgacctgctgaaccggatcgaagtgaacatgatcgacatcacctaccgcgagtacctggaaaacatgaacgacaagaggccccccaggatcattaagacaatcgcctccaagacccagagcattaagaagtacagcacagacattctgggcaacctgtatgaagtgaaatctaagaagcaccctcagatcatcaaaaagggc

SEQ ID NO: 28 - DNA, 7009 bp, Artificial Sequence
  Synthetic
ctaaattgtaagcgttaatattttgttaaaattcgcgttaaatttttgttaaatcagctcattttttaaccaataggccgaaatcggcaaaatcccttataaatcaaaagaatagaccgagatagggttgagtgttgttccagtttggaacaagagtccactattaaagaacgtggactccaacgtcaaagggcgaaaaaccgtctatcagggcgatggcccactacgtgaaccatcaccctaatcaagttttttggggtcgaggtgccgtaaagcactaaatcggaaccctaaagggagcccccgatttagagcttgacggggaaagccggcgaacgtggcgagaaaggaagggaagaaagcgaaaggagcgggcgctagggcgctggcaagtgtagcggtcacgctgcgcgtaaccaccacacccgccgcgcttaatgcgccgctacagggcgcgtcccattcgccattcaggctgcgcaactgttgggaagggcgatcggtgcgggcctcttcgctattacgccagctggcgaaagggggatgtgctgcaaggcgattaagttgggtaacgccagggttttcccagtcacgacgttgtaaaacgacggccagtgagcgcgcgtaatacgactcactatagggcgaattgggtacctttaattctagtactatgcatgcgttgacattgattattgactagttattaatagtaatcaattacggggtcattagttcatagcccatatatggagttccgcgttacataacttacggtaaatggcccgcctggctgaccgcccaacgacccccgcccattgacgtcaataatgacgtatgttcccatagtaacgccaatagggactttccattgacgtcaatgggtggagtatttacggtaaactgcccacttggcagtacatcaagtgtatcatatgccaagtacgccccctattgacgtcaatgacggtaaatggcccgcctggcattatgcccagtacatgaccttatgggactttcctacttggcagtacatctacgtattagtcatcgctattaccatggtgatgcggttttggcagtacatcaatgggcgtggatagcggtttgactcacggggatttccaagtctccaccccattgacgtcaatgggagtttgttttggcaccaaaatcaacgggactttccaaaatgtcgtaacaactccgccccattgacgcaaatgggcggtaggcgtgtacggtgggaggtctatataagcagagctctctggctaactaccggtgccaccatgaaaaggaactacattctggggctggacatcgggattacaagcgtggggtatgggattattgactatgaaacaagggacgtgatcgacgcaggcgtcagactgttcaaggaggccaacgtggaaaacaatgagggacggagaagcaagaggggagccaggcgcctgaaacgacggagaaggcacagaatccagagggtgaagaaactgctgttcgattacaacctgctgaccgaccattctgagctgagtggaattaatccttatgaagccagggtgaaaggcctgagtcagaagctgtcagaggaagagttttccgcagctctgctgcacctggctaagcgccgaggagtgcataacgtcaatgaggtggaagaggacaccggcaacgagctgtctacaaaggaacagatctcacgcaatagcaaagctctggaagagaagtatgtcgcagagctgcagctggaacggctgaagaaagatggcgaggtgagagggtcaattaataggttcaagacaagcgactacgtcaaagaagccaagcagctgctgaaagtgcagaaggcttaccaccagctggatcagagcttcatcgatacttatatcgacctgctggagactcggagaacctactatgagggaccaggagaagggagccccttcggatggaaagacatcaaggaatggtacgagatgctgatgggacattgcacctattttccagaagagctgagaagcgtcaagtacgcttataacgcagatctgtacaacgccctgaatgacctgaacaacctggtcatcaccagggatgaaaacgagaaactggaatactatgagaagttccagatcatcgaaaacgtgtttaagcagaagaaaaagcctacactgaaacagattgctaaggagatcctggtcaacgaagaggacatcaagggctaccgggtgacaagcactggaaaaccagagttcaccaatctgaaagtgtatcacgatattaaggacatcacagcacggaaagaaatcattgagaacgccgaactgctggatcagattgctaagatcctgactatctaccagagctccgaggacatccaggaagagctgactaacctgaacagcgagctgacccaggaagagatcgaacagattagtaatctgaaggggtacaccggaacacacaacctgtccctgaaagctatcaatctgattctggatgagctgtggcatacaaacgacaatcagattgcaatctttaaccggctgaagctggtcccaaaaaaggtggacctgagtcagcagaaagagatcccaaccacactggtggacgatttcattctgtcacccgtggtcaagcggagcttcatccagagcatcaaagtgatcaacgccatcatcaagaagtacggcctgcccaatgatatcattatcgagctggctagggagaagaacagcaaggacgcacagaagatgatcaatgagatgcagaaacgaaaccggcagaccaatgaacgcattgaagagattatccgaactaccgggaaagagaacgcaaagtacctgattgaaaaaatcaagctgcacgatatgcaggagggaaagtgtctgtattctctggaggccatccccctggaggacctgctgaacaatccattcaactacgaggtcgatcatattatccccagaagcgtgtccttcgacaattcctttaacaacaaggtgctggtcaagcaggaagagaactctaaaaagggcaataggactcctttccagtacctgtctagttcagattccaagatctcttacgaaacctttaaaaagcacattctgaatctggccaaaggaaagggccgcatcagcaagaccaaaaaggagtacctgctggaagagcgggacatcaacagattctccgtccagaaggattttattaaccggaatctggtggacacaagatacgctactcgcggcctgatgaatctgctgcgatcctatttccgggtgaacaatctggatgtgaaagtcaagtccatcaacggcgggttcacatcttttctgaggcgcaaatggaagtttaaaaaggagcgcaacaaagggtacaagcaccatgccgaagatgctctgattatcgcaaatgccgacttcatctttaaggagtggaaaaagctggacaaagccaagaaagtgatggagaaccagatgttcgaagagaagcaggccgaatctatgcccgaaatcgagacagaacaggagtacaaggagattttcatcactcctcaccagatcaagcatatcaaggatttcaaggactacaagtactctcaccgggtggataaaaagcccaacagagagctgatcaatgacaccctgtatagtacaagaaaagacgataaggggaataccctgattgtgaacaatctgaacggactgtacgacaaagataatgacaagctgaaaaagctgatcaacaaaagtcccgagaagctgctgatgtaccaccatgatcctcagacatatcagaaactgaagctgattatggagcagtacggcgacgagaagaacccactgtataagtactatgaagagactgggaactacctgaccaagtatagcaaaaaggataatggccccgtgatcaagaagatcaagtactatgggaacaagctgaatgcccatctggacatcacagacgattaccctaacagtcgcaacaaggtggtcaagctgtcactgaagccatacagattcgatgtctatctggacaacggcgtgtataaatttgtgactgtcaagaatctggatgtcatcaaaaaggagaactactatgaagtgaatagcaagtgctacgaagaggctaaaaagctgaaaaagattagcaaccaggcagagttcatcgcctccttttacaacaacgacctgattaagatcaatggcgaactgtatagggtcatcggggtgaacaatgatctgctgaaccgcattgaagtgaatatgattgacatcacttaccgagagtatctggaaaacatgaatgataagcgcccccctcgaattatcaaaacaattgcctctaagactcagagtatcaaaaagtactcaaccgacattctgggaaacctgtatgaggtgaagagcaaaaagcaccctcagattatcaaaaagggcagcggaggcaagcgtcctgctgctactaagaaagctggtcaagctaagaaaaagaaaggatcctacccatacgatgttccagattacgcttaagaattcctagagctcgctgatcagcctcgactgtgccttctagttgccagccatctgttgtttgcccctcccccgtgccttccttgaccctggaaggtgccactcccactgtcctttcctaataaaatgaggaaattgcatcgcattgtctgagtaggtgtcattctattctggggggtggggtggggcaggacagcaagggggaggattgggaagagaatagcaggcatgctggggaggtagcggccgcccgcggtggagctccagcttttgttccctttagtgagggttaattgcgcgcttggcgtaatcatggtcatagctgtttcctgtgtgaaattgttatccgctcacaattccacacaacatacgagccggaagcataaagtgtaaagcctggggtgcctaatgagtgagctaactcacattaattgcgttgcgctcactgcccgctttccagtcgggaaacctgtcgtgccagctgcattaatgaatcggccaacgcgcggggagaggcggtttgcgtattgggcgctcttccgcttcctcgctcactgactcgctgcgctcggtcgttcggctgcggcgagcggtatcagctcactcaaaggcggtaatacggttatccacagaatcaggggataacgcaggaaagaacatgtgagcaaaaggccagcaaaaggccaggaaccgtaaaaaggccgcgttgctggcgtttttccataggctccgcccccctgacgagcatcacaaaaatcgacgctcaagtcagaggtggcgaaacccgacaggactataaagataccaggcgtttccccctggaagctccctcgtgcgctctcctgttccgaccctgccgcttaccggatacctgtccgcctttctcccttcgggaagcgtggcgctttctcatagctcacgctgtaggtatctcagttcggtgtaggtcgttcgctccaagctgggctgtgtgcacgaaccccccgttcagcccgaccgctgcgccttatccggtaactatcgtcttgagtccaacccggtaagacacgacttatcgccactggcagcagccactggtaacaggattagcagagcgaggtatgtaggcggtgctacagagttcttgaagtggtggcctaactacggctacactagaaggacagtatttggtatctgcgctctgctgaagccagttaccttcggaaaaagagttggtagctcttgatccggcaaacaaaccaccgctggtagcggtggtttttttgtttgcaagcagcagattacgcgcagaaaaaaaggatctcaagaagatcctttgatcttttctacggggtctgacgctcagtggaacgaaaactcacgttaagggattttggtcatgagattatcaaaaaggatcttcacctagatccttttaaattaaaaatgaagttttaaatcaatctaaagtatatatgagtaaacttggtctgacagttaccaatgcttaatcagtgaggcacctatctcagcgatctgtctatttcgttcatccatagttgcctgactccccgtcgtgtagataactacgatacgggagggcttaccatctggccccagtgctgcaatgataccgcgagacccacgctcaccggctccagatttatcagcaataaaccagccagccggaagggccgagcgcagaagtggtcctgcaactttatccgcctccatccagtctattaattgttgccgggaagctagagtaagtagttcgccagttaatagtttgcgcaacgttgttgccattgctacaggcatcgtggtgtcacgctcgtcgtttggtatggcttcattcagctccggttcccaacgatcaaggcgagttacatgatcccccatgttgtgcaaaaaagcggttagctccttcggtcctccgatcgttgtcagaagtaagttggccgcagtgttatcactcatggttatggcagcactgcataattctcttactgtcatgccatccgtaagatgcttttctgtgactggtgagtactcaaccaagtcattctgagaatagtgtatgcggcgaccgagttgctcttgcccggcgtcaatacgggataataccgcgccacatagcagaactttaaaagtgctcatcattggaaaacgttcttcggggcgaaaactctcaaggatcttaccgctgttgagatccagttcgatgtaacccactcgtgcacccaactgatcttcagcatcttttactttcaccagcgtttctgggtgagcaaaaacaggaaggcaaaatgccgcaaaaaagggaataagggcgacacggaaatgttgaatactcatactcttcctttttcaatattattgaagcatttatcagggttattgtctcatgagcggatacatatttgaatgtatttagaaaaataaacaaataggggttccgcgcacatttccccgaaaagtgccac

SEQ ID NO: 29 - DNA, 21 bp, Artificial Sequence
  Synthetic
ctttactttgtattatgtaaa

SEQ ID NO: 30 - DNA, 21 bp, Artificial Sequence
  Synthetic
tttgaaatatttttgatatct

SEQ ID NO: 31 - DNA, 21 bp, Artificial Sequence
  Synthetic
tttaagtaatccgaggtactc

SEQ ID NO: 32 - DNA, 21 bp, Artificial Sequence
  Synthetic
tttaaatacattgtcgtaatt

SEQ ID NO: 33 - DNA, 21 bp, Artificial Sequence
  Synthetic
taccttaattttgacgtcaca

SEQ ID NO: 34 - DNA, 21 bp, Artificial Sequence
  Synthetic
atttgacaggtgagaaatctc

SEQ ID NO: 35 - DNA, 21 bp, Artificial Sequence
  Synthetic
tcatttataatacaggggaat

SEQ ID NO: 36 - DNA, 21 bp, Artificial Sequence
  Synthetic
ttaaagtcatttataatacag

SEQ ID NO: 37 - DNA, 21 bp, Artificial Sequence
  Synthetic
aaatagacactgaagaaaggg

SEQ ID NO: 38 - DNA, 21 bp, Artificial Sequence
  Synthetic
ccccaattaaaataaaattta

SEQ ID NO: 39 - DNA, 19 bp, Artificial Sequence
  Synthetic
taagtaatccgaggtactc

SEQ ID NO: 40 - DNA, 20 bp, Artificial Sequence
  Synthetic
ttaagtaatccgaggtactc

SEQ ID NO: 41 - DNA, 22 bp, Artificial Sequence
  Synthetic
gtttaagtaatccgaggtactc

SEQ ID NO: 42 - DNA, 23 bp, Artificial Sequence
  Synthetic
ggtttaagtaatccgaggtactc

SEQ ID NO: 43 - DNA, 19 bp, Artificial Sequence
  Synthetic
ttgacaggtgagaaatctc

SEQ ID NO: 44 - DNA, 20 bp, Artificial Sequence
  Synthetic
tttgacaggtgagaaatctc

SEQ ID NO: 45 - DNA, 22 bp, Artificial Sequence
  Synthetic
catttgacaggtgagaaatctc

SEQ ID NO: 46 - DNA, 23 bp, Artificial Sequence
  Synthetic
tcatttgacaggtgagaaatctc

SEQ ID NO: 47 - DNA, 19 bp, Artificial Sequence
  Synthetic
atttataatacaggggaat

SEQ ID NO: 48 - DNA, 20 bp, Artificial Sequence
  Synthetic
catttataatacaggggaat

SEQ ID NO: 49 - DNA, 22 bp, Artificial Sequence
  Synthetic
gtcatttataatacaggggaat

SEQ ID NO: 50 - DNA, 23 bp, Artificial Sequence
  Synthetic
agtcatttataatacaggggaat

SEQ ID NO: 51 - DNA, 20 bp, Artificial Sequence
  Synthetic
gcactaccagagctaactca

SEQ ID NO: 52 - DNA, 76 bp, Artificial Sequence
  Synthetic
gttttagtactctggaaacagaatctactaaaacaaggcaaaatgccgtgtttatctcgtcaacttgttggcgaga

SEQ ID NO: 53 - DNA, 118 bp, Artificial Sequence
  Synthetic
gcaacaatgcaggatttggaacagaggcgtccccagttggaagaactcattaccgctgcccaaaatttgaaaaacaagaccagcaatcaagaggctagaacaatcattacggatcgaa

SEQ ID NO: 54 - DNA, 470 bp, Artificial Sequence
  Synthetic
gttaaattgttttctataaacccttatacagtaacatcttttttatttctaaaagtgttttggctggtctcacaattgtactttactttgtattatgtaaaaggaatacacaacgctgaagaaccctgatactaagggatatttgttcttacaggcaacaatgcaggatttggaacagaggcgtccccagttggaagaactcattaccgctgcccaaaatttgaaaaacaagaccagcaatcaagaggctagaacaatcattacggatcgaagtaagttttttaacaagcatgggacacacaaagcaagatgcatgacaagtttcaataaaaacttaagttcatatatccccctcacatttataaaaataatgtgaaataattgtaaatgataacaattgtgctgagattttcagtccataatgttaccttttaataaatgaatgtaattccattgaatagaagaaatac

SEQ ID NO: 55 - DNA, 3516 bp, Artificial Sequence
  Synthetic
gcaacaatgcaggatttggaacagaggcgtccccagttggaagaactcattaccgctgcccaaaatttgaaaaacaagaccagcaatcaagaggctagaacaatcattacggatcgaattgaaagaattcagaatcagtgggatgaagtacaagaacaccttcagaaccggaggcaacagttgaatgaaatgttaaaggattcaacacaatggctggaagctaaggaagaagctgagcaggtcttaggacaggccagagccaagcttgagtcatggaaggagggtccctatacagtagatgcaatccaaaagaaaatcacagaaaccaagcagttggccaaagacctccgccagtggcagacaaatgtagatgtggcaaatgacttggccctgaaacttctccgggattattctgcagatgataccagaaaagtccacatgataacagagaatatcaatgcctcttggagaagcattcataaaagggtgagtgagcgagaggctgctttggaagaaactcatagattactgcaacagttccccctggacctggaaaagtttcttgcctggcttacagaagctgaaacaactgccaatgtcctacaggatgctacccgtaaggaaaggctcctagaagactccaagggagtaaaagagctgatgaaacaatggcaagacctccaaggtgaaattgaagctcacacagatgtttatcacaacctggatgaaaacagccaaaaaatcctgagatccctggaaggttccgatgatgcagtcctgttacaaagacgtttggataacatgaacttcaagtggagtgaacttcggaaaaagtctctcaacattaggtcccatttggaagccagttctgaccagtggaagcgtctgcacctttctctgcaggaacttctggtgtggctacagctgaaagatgatgaattaagccggcaggcacctattggaggcgactttccagcagttcagaagcagaacgatgtacatagggccttcaagagggaattgaaaactaaagaacctgtaatcatgagtactcttgagactgtacgaatatttctgacagagcagcctttggaaggactagagaaactctaccaggagcccagagagctgcctcctgaggagagagcccagaatgtcactcggcttctacgaaagcaggctgaggaggtcaatactgagtgggaaaaattgaacctgcactccgctgactggcagagaaaaatagatgagacccttgaaagactccaggaacttcaagaggccacggatgagctggacctcaagctgcgccaagctgaggtgatcaagggatcctggcagcccgtgggcgatctcctcattgactctctccaagatcacctcgagaaagtcaaggcacttcgaggagaaattgcgcctctgaaagagaacgtgagccacgtcaatgaccttgctcgccagcttaccactttgggcattcagctctcaccgtataacctcagcactctggaagacctgaacaccagatggaagcttctgcaggtggccgtcgaggaccgagtcaggcagctgcatgaagcccacagggactttggtccagcatctcagcactttctttccacgtctgtccagggtccctgggagagagccatctcgccaaacaaagtgccctactatatcaaccacgagactcaaacaacttgctgggaccatcccaaaatgacagagctctaccagtctttagctgacctgaataatgtcagattctcagcttataggactgccatgaaactccgaagactgcagaaggccctttgcttggatctcttgagcctgtcagctgcatgtgatgccttggaccagcacaacctcaagcaaaatgaccagcccatggatatcctgcagattattaattgtttgaccactatttatgaccgcctggagcaagagcacaacaatttggtcaacgtccctctctgcgtggatatgtgtctgaactggctgctgaatgtttatgatacgggacgaacagggaggatccgtgtcctgtcttttaaaactggcatcatttccctgtgtaaagcacatttggaagacaagtacagataccttttcaagcaagtggcaagttcaacaggattttgtgaccagcgcaggctgggcctccttctgcatgattctatccaaattccaagacagttgggtgaagttgcatcctttgggggcagtaacattgagccaagtgtccggagctgcttccaatttgctaataataagccagagatcgaagcggccctcttcctagactggatgagactggaaccccagtccatggtgtggctgcccgtcctgcacagagtggctgctgcagaaactgccaagcatcaggccaaatgtaacatctgcaaagagtgtccaatcattggattcaggtacaggagtctaaagcactttaattatgacatctgccaaagctgctttttttctggtcgagttgcaaaaggccataaaatgcactatcccatggtggaatattgcactccgactacatcaggagaagatgttcgagactttgccaaggtactaaaaaacaaatttcgaaccaaaaggtattttgcgaagcatccccgaatgggctacctgccagtgcagactgtcttagagggggacaacatggaaactcccgttactctgatcaacttctggccagtagattctgcgcctgcctcgtcccctcagctttcacacgatgatactcattcacgcattgaacattatgctagcaggctagcagaaatggaaaacagcaatggatcttatctaaatgatagcatctctcctaatgagagcatagatgatgaacatttgttaatccagcattactgccaaagtttgaaccaggactcccccctgagccagcctcgtagtcctgcccagatcttgatttccttagagagtgaggaaagaggggagctagagagaatcctagcagatcttgaggaagaaaacaggaatctgcaagcagaatatgaccgtctaaagcagcagcacgaacataaaggcctgtccccactgccgtcccctcctgaaatgatgcccacctctccccagagtccccgggatgctgagctcattgctgaggccaagctactgcgtcaacacaaaggccgcctggaagccaggatgcaaatcctggaagaccacaataaacagctggagtcacagttacacaggctaaggcagctgctggagcaaccccaggcagaggccaaagtgaatggcacaacggtgtcctctccttctacctctctacagaggtccgacagcagtcagcctatgctgctccgagtggttggcagtcaaacttcggactccatgggtgaggaagatcttctcagtcctccccaggacacaagcacagggttagaggaggtgatggagcaactcaacaactccttccctagttcaagaggaagaaatacccctggaaagccaatgagagaggacacaatgtag

SEQ ID NO: 56 - DNA, 4016 bp, Artificial Sequence
  Synthetic
gttaatttgcgttctagccaccgagatacagtaacatcttttttatttctaaaagtgttttggctggtctcacaattgtactttactttgtattatgtaaaaggaatacacaacgctgaagaaccctgatactaagggatatttgttcttacaggcaacaatgcaggatttggaacagaggcgtccccagttggaagaactcattaccgctgcccaaaatttgaaaaacaagaccagcaatcaagaggctagaacaatcattacggatcgaattgaaagaattcagaatcagtgggatgaagtacaagaacaccttcagaaccggaggcaacagttgaatgaaatgttaaaggattcaacacaatggctggaagctaaggaagaagctgagcaggtcttaggacaggccagagccaagcttgagtcatggaaggagggtccctatacagtagatgcaatccaaaagaaaatcacagaaaccaagcagttggccaaagacctccgccagtggcagacaaatgtagatgtggcaaatgacttggccctgaaacttctccgggattattctgcagatgataccagaaaagtccacatgataacagagaatatcaatgcctcttggagaagcattcataaaagggtgagtgagcgagaggctgctttggaagaaactcatagattactgcaacagttccccctggacctggaaaagtttcttgcctggcttacagaagctgaaacaactgccaatgtcctacaggatgctacccgtaaggaaaggctcctagaagactccaagggagtaaaagagctgatgaaacaatggcaagacctccaaggtgaaattgaagctcacacagatgtttatcacaacctggatgaaaacagccaaaaaatcctgagatccctggaaggttccgatgatgcagtcctgttacaaagacgtttggataacatgaacttcaagtggagtgaacttcggaaaaagtctctcaacattaggtcccatttggaagccagttctgaccagtggaagcgtctgcacctttctctgcaggaacttctggtgtggctacagctgaaagatgatgaattaagccggcaggcacctattggaggcgactttccagcagttcagaagcagaacgatgtacatagggccttcaagagggaattgaaaactaaagaacctgtaatcatgagtactcttgagactgtacgaatatttctgacagagcagcctttggaaggactagagaaactctaccaggagcccagagagctgcctcctgaggagagagcccagaatgtcactcggcttctacgaaagcaggctgaggaggtcaatactgagtgggaaaaattgaacctgcactccgctgactggcagagaaaaatagatgagacccttgaaagactccaggaacttcaagaggccacggatgagctggacctcaagctgcgccaagctgaggtgatcaagggatcctggcagcccgtgggcgatctcctcattgactctctccaagatcacctcgagaaagtcaaggcacttcgaggagaaattgcgcctctgaaagagaacgtgagccacgtcaatgaccttgctcgccagcttaccactttgggcattcagctctcaccgtataacctcagcactctggaagacctgaacaccagatggaagcttctgcaggtggccgtcgaggaccgagtcaggcagctgcatgaagcccacagggactttggtccagcatctcagcactttctttccacgtctgtccagggtccctgggagagagccatctcgccaaacaaagtgccctactatatcaaccacgagactcaaacaacttgctgggaccatcccaaaatgacagagctctaccagtctttagctgacctgaataatgtcagattctcagcttataggactgccatgaaactccgaagactgcagaaggccctttgcttggatctcttgagcctgtcagctgcatgtgatgccttggaccagcacaacctcaagcaaaatgaccagcccatggatatcctgcagattattaattgtttgaccactatttatgaccgcctggagcaagagcacaacaatttggtcaacgtccctctctgcgtggatatgtgtctgaactggctgctgaatgtttatgatacgggacgaacagggaggatccgtgtcctgtcttttaaaactggcatcatttccctgtgtaaagcacatttggaagacaagtacagataccttttcaagcaagtggcaagttcaacaggattttgtgaccagcgcaggctgggcctccttctgcatgattctatccaaattccaagacagttgggtgaagttgcatcctttgggggcagtaacattgagccaagtgtccggagctgcttccaatttgctaataataagccagagatcgaagcggccctcttcctagactggatgagactggaaccccagtccatggtgtggctgcccgtcctgcacagagtggctgctgcagaaactgccaagcatcaggccaaatgtaacatctgcaaagagtgtccaatcattggattcaggtacaggagtctaaagcactttaattatgacatctgccaaagctgctttttttctggtcgagttgcaaaaggccataaaatgcactatcccatggtggaatattgcactccgactacatcaggagaagatgttcgagactttgccaaggtactaaaaaacaaatttcgaaccaaaaggtattttgcgaagcatccccgaatgggctacctgccagtgcagactgtcttagagggggacaacatggaaactcccgttactctgatcaacttctggccagtagattctgcgcctgcctcgtcccctcagctttcacacgatgatactcattcacgcattgaacattatgctagcaggctagcagaaatggaaaacagcaatggatcttatctaaatgatagcatctctcctaatgagagcatagatgatgaacatttgttaatccagcattactgccaaagtttgaaccaggactcccccctgagccagcctcgtagtcctgcccagatcttgatttccttagagagtgaggaaagaggggagctagagagaatcctagcagatcttgaggaagaaaacaggaatctgcaagcagaatatgaccgtctaaagcagcagcacgaacataaaggcctgtccccactgccgtcccctcctgaaatgatgcccacctctccccagagtccccgggatgctgagctcattgctgaggccaagctactgcgtcaacacaaaggccgcctggaagccaggatgcaaatcctggaagaccacaataaacagctggagtcacagttacacaggctaaggcagctgctggagcaaccccaggcagaggccaaagtgaatggcacaacggtgtcctctccttctacctctctacagaggtccgacagcagtcagcctatgctgctccgagtggttggcagtcaaacttcggactccatgggtgaggaagatcttctcagtcctccccaggacacaagcacagggttagaggaggtgatggagcaactcaacaactccttccctagttcaagaggaagaaatacccctggaaagccaatgagagaggacacaatgtagtcgtttaaaccgctgatcagcctcgaaacttgtttattgcagcttataatggttacaaataaagcaatagcatcacaaatttcacaaataaagcatttttttcactgcattctagttgtggtttgtccaaactcatcaatgtatcttagtaagttttttaacaagcatgggacacacaaagcaagatgcatgacaagtttcaataaaaacttaagttcatatatccccctcacatttataaaaataatgtgaaataattgtaaatgataacaattgtgctgagattttcagtccataatgttaccttttaataaatgaatgtaattccattgaatagaagaaatac

SEQ ID NO: 57 - DNA, 4258 bp, Artificial Sequence
  Synthetic
ttggccactccctctctgcgcgctcgctcgctcactgaggccgggcgaccaaaggtcgcccgacgcccgggctttgcccgggcggcctcagtgagcgagcgagcgcgcagagagggagtggccaactccatcactaggggttcctcagatctgaattcggtaccttcctagggcctatttcccatgattccttcatatttgcatatacgatacaaggctgttagagagataattggaattaatttgactgtaaacacaaagatattagtacaaaatacgtgacgtagaaagtaataatttcttgggtagtttgcagttttaaaattatgttttaaaatggactatcatatgcttaccgtaacttgaaagtatttcgatttcttggctttatatatcttgtggaaaggacgaaacaccgtcatttataatacaggggaatgttttagtactctggaaacagaatctactaaaacaaggcaaaatgccgtgtttatctcgtcaacttgttggcgagatttttttctagacccagctttcttgtacaaagttggcgtttaaacattcctattcccctgtattataaatgagttaaattgttttctataaacccttatacagtaacatcttttttatttctaaaagtgttttggctggtctcacaattgtactttactttgtattatgtaaaaggaatacacaacgctgaagaaccctgatactaagggatatttgttcttacaggcaacaatgcaggatttggaacagaggcgtccccagttggaagaactcattaccgctgcccaaaatttgaaaaacaagaccagcaatcaagaggctagaacaatcattacggatcgaagtaagttttttaacaagcatgggacacacaaagcaagatgcatgacaagtttcaataaaaacttaagttcatatatccccctcacatttataaaaataatgtgaaataattgtaaatgataacaattgtgctgagattttcagtccataatgttaccttttaataaatgaatgtaattccattgaatagaagaaatacattcctattcccctgtattataaatgagctagctcggagagacgacatctagaattaaactgtcactatcgattactaattttttgctcataatagaagcagcgattaaaggaatagaatcaacagttccagtaacatctcttagtgcatacatttttttatcagcaggaacaatatcatctgactgacctgtgatgctcattccaacttcattaattgttttaatgaatttttctttagataattcacttgttcaacctttacatgactctaatttatcaatagtaccaccagttactccaagtcctctaccagaaagtttacaaacctttactccataacttgcaactaacggactatatactaaacttgttttgtctccaactccgccagttgaatgcttatcagcttttaaacctgtaacctcactgacatcataaacatatcctgattcaacataagattgggttaatgctaaagtttctgctttggtcattccattaaaataaaccgccatagcaaaagcagccatttgataatctgttacattatttttaacgtaactgtttatcaatcatttaatttcttcagctgataattctattgaatgtttctttttttctataatttcactaaaactgtagttcataagtctccttttgtaagagtgcacaatatttacaccattactctttctactatattataatagaatagacatataaaaaacataaggagtacaaatggtttttgataaaaataacaaagtttatagtgaatgaataaatagccaaaaattggatgatgagttgaaaagccttttagtaaatgctactgatgatgaattgcatgcagcatttgaaggaatagagttagaatttggaacagcaggtataagaggtattcttggagcaggacctggaagatttaacgtttacactgttaaaaaagttactattgcatttgcagaattattaaaacaaaattacccaaataggttgaatgatggaatagttgttggtcatgataaccgtcataattctaaacagtttgcaaaagttgtagccgaagttttatcaagcttgtgaaatagctgttgaagctggattagaatttgttaaaacatcaacaggattttcaaaatcaggtgcaacatttgaagatgttaaactaatgaagtcagttgttaaagacaatgctttagttaaagcagctggtggagttagaacatttgaagatgctcaaaaaatgattgaagcaggagctgaccgcttaggaacaagtggtggagtagctattattaaaggtgaagaaaacaacgcgagttactaaaactagcgtttttttattttgctcatttttattaaaagtttgcaaaaaggaacataaaaattctaattattgatactaaagttattaaaaagaagattttggttgattttataaaggtcatagaatataatattttagcatgtgtattttgtgtgctcatttacaaccgtctcgcggccgcggggatccagacatgataagatacattgatgagtttggacaaaccacaactagaatgcagtgaaaaaaatgctttatttgtgaaatttgtgatgctattgctttatttgtaaccattataagctgcaataaacaagttaacaacaacaattgcattcattttatgtttcaggttcagggggaggtgtgggaggttttttagtcgacctcgagcagtgtggttttgcaagaggaagcaaaaagcctctccacccaggcctggaatgtttccacccaagtcgaaggcagtgtggttttgcaagaggaagcaaaaagcctctccacccaggcctggaatgtttccacccaatgtcgagcaaccccgcccagcgtcttgtcattggcgaattcgaacacgcagatgcagtcggggcggcgcggtcccaggtccacttcgcatattaaggtgacgcgtgtggcctcgaacaccgagcgaccctgcagccaatatgggatcggccattgaacaagatggattgcacgcaggttctccggccgcttgggtggagaggctattcggctatgactgggcacaacagacaatcggctgctctgatgccgccgtgttccggctgtcagcgcaggggcgcccggttctttttgtcaagaccgacctgtccggtgccctgaatgaactgcaggacgaggcagcgcggctatcgtggctggccacgacgggcgttccttgcgcagctgtgctcgacgttgtcactgaagcgggaagggactggctgctattgggcgaagtgccggggcaggatctcctgtcatctcaccttgctcctgccgagaaagtatccatcatggctgatgcaatgcggcggctgcatacgcttgatccggctacctgcccattcgaccaccaagcgaaacatcgcatcgagcgagcacgtactcggatggaagccggtcttgtcgatcaggatgatctggacgaagagcatcaggggctcgcgccagccgaactgttcgccaggctcaaggcgcgcatgcccgacggcgaggatctcgtcgtgacccatggcgatgcctgcttgccgaatatcatggtggaaaatggccgcttttctggattcatcgactgtggccggctgggtgtggcggaccgctatcaggacatagcgttggctacccgtgatattgctgaagagcttggcggcgaatgggctgaccgcttcctcgtgctttacggtatcgccgctcccgattcgcagcgcatcgccttctatcgccttcttgacgagttcttctgaggggatccgtcgactagagctcgctgatcagcctcgactgtgccttctagttgccagccatctgttgtttgcccctcccccgtgccttccttgaccctggaaggtgccactcccactgtcctttcctaataaaatgaggaaattgcatcgcattgtctgagtaggtgtcattctattctggggggtggggtggggcaggacagcaagggggaggattgggaagacaatagcaggcatgctggggagagatctaggaacccctagtgatggagttggccactccctctctgcgcgctcgctcgctcactgaggccgcccgggcaaagcccgggcgtcgggcgacctttggtcgcccggcctcagtgagcgagcgagcgcgcagagagggagtggccaa

SEQ ID NO: 58 - DNA, 4255 bp, Artificial Sequence
  Synthetic
ttggccactccctctctgcgcgctcgctcgctcactgaggccgggcgaccaaaggtcgcccgacgcccgggctttgcccgggcggcctcagtgagcgagcgagcgcgcagagagggagtggccaactccatcactaggggttcctcagatctgaattcggtaccttcctagggcctatttcccatgattccttcatatttgcatatacgatacaaggctgttagagagataattggaattaatttgactgtaaacacaaagatattagtacaaaatacgtgacgtagaaagtaataatttcttgggtagtttgcagttttaaaattatgttttaaaatggactatcatatgcttaccgtaacttgaaagtatttcgatttcttggctttatatatcttgtggaaaggacgaaacaccgttaagtaatccgaggtactcgttttagtactctggaaacagaatctactaaaacaaggcaaaatgccgtgtttatctcgtcaacttgttggcgagatttttttctagacccagctttcttgtacaaagttggcgtttaaacattcctgagtacctcggattacttaagttaaattgttttctataaacccttatacagtaacatcttttttatttctaaaagtgttttggctggtctcacaattgtactttactttgtattatgtaaaaggaatacacaacgctgaagaaccctgatactaagggatatttgttcttacaggcaacaatgcaggatttggaacagaggcgtccccagttggaagaactcattaccgctgcccaaaatttgaaaaacaagaccagcaatcaagaggctagaacaatcattacggatcgaagtaagttttttaacaagcatgggacacacaaagcaagatgcatgacaagtttcaataaaaacttaagttcatatatccccctcacatttataaaaataatgtgaaataattgtaaatgataacaattgtgctgagattttcagtccataatgttaccttttaataaatgaatgtaattccattgaatagaagaaatacattcctgagtacctcggattacttaagctagctcggagagacgacatctagaattaaactgtcactatcgattactaattttttgctcataatagaagcagcgattaaaggaatagaatcaacagttccagtaacatctcttagtgcatacatttttttatcagcaggaacaatatcatctgactgacctgtgatgctcattccaacttcattaattgttttaatgaatttttctttagataattcacttgttcaacctttacatgactctaatttatcaatagtaccaccagttactccaagtcctctaccagaaagtttacaaacctttactccataacttgcaactaacggactatatactaaacttgttttgtctccaactccgccagttgaatgcttatcagcttttaaacctgtaacctcactgacatcataaacatatcctgattcaacataagattgggttaatgctaaagtttctgctttggtcattccattaaaataaaccgccatagcaaaagcagccatttgataatctgttacattatttttaacgtaactgtttatcaatcatttaatttcttcagctgataattctattgaatgtttctttttttctataatttcactaaaactgtagttcataagtctccttttgtaagagtgcacaatatttacaccattactctttctactatattataatagaatagacatataaaaaacataaggagtacaaatggtttttgataaaaataacaaagtttatagtgaatgaataaatagccaaaaattggatgatgagttgaaaagccttttagtaaatgctactgatgatgaattgcatgcagcatttgaaggaatagagttagaatttggaacagcaggtataagaggtattcttggagcaggacctggaagatttaacgtttacactgttaaaaaagttactattgcatttgcagaattattaaaacaaaattacccaaataggttgaatgatggaatagttgttggtcatgataaccgtcataattctaaacagtttgcaaaagttgtagccgaagttttatcaagcttgtgaaatagctgttgaagctggattagaatttgttaaaacatcaacaggattttcaaaatcaggtgcaacatttgaagatgttaaactaatgaagtcagttgttaaagacaatgctttagttaaagcagctggtggagttagaacatttgaagatgctcaaaaaatgattgaagcaggagctgaccgcttaggaacaagtggtggagtagctattattaaaggtgaagaaaacaacgcgagttactaaaactagcgtttttttattttgctcatttttattaaaagtttgcaaaaaggaacataaaaattctaattattgatactaaagttattaaaaagaagattttggttgattttataaaggtcatagaatataatattttagcatgtgtattttgtgtgctcatttacaaccgtctcgcggccgcggggatccagacatgataagatacattgatgagtttggacaaaccacaactagaatgcagtgaaaaaaatgctttatttgtgaaatttgtgatgctattgctttatttgtaaccattataagctgcaataaacaagttaacaacaacaattgcattcattttatgtttcaggttcagggggaggtgtgggaggttttttagtcgacctcgagcagtgtggttttgcaagaggaagcaaaaagcctctccacccaggcctggaatgtttccacccaagtcgaaggcagtgtggttttgcaagaggaagcaaaaagcctctccacccaggcctggaatgtttccacccaatgtcgagcaaccccgcccagcgtcttgtcattggcgaattcgaacacgcagatgcagtcggggcggcgcggtcccaggtccacttcgcatattaaggtgacgcgtgtggcctcgaacaccgagcgaccctgcagccaatatgggatcggccattgaacaagatggattgcacgcaggttctccggccgcttgggtggagaggctattcggctatgactgggcacaacagacaatcggctgctctgatgccgccgtgttccggctgtcagcgcaggggcgcccggttctttttgtcaagaccgacctgtccggtgccctgaatgaactgcaggacgaggcagcgcggctatcgtggctggccacgacgggcgttccttgcgcagctgtgctcgacgttgtcactgaagcgggaagggactggctgctattgggcgaagtgccggggcaggatctcctgtcatctcaccttgctcctgccgagaaagtatccatcatggctgatgcaatgcggcggctgcatacgcttgatccggctacctgcccattcgaccaccaagcgaaacatcgcatcgagcgagcacgtactcggatggaagccggtcttgtcgatcaggatgatctggacgaagagcatcaggggctcgcgccagccgaactgttcgccaggctcaaggcgcgcatgcccgacggcgaggatctcgtcgtgacccatggcgatgcctgcttgccgaatatcatggtggaaaatggccgcttttctggattcatcgactgtggccggctgggtgtggcggaccgctatcaggacatagcgttggctacccgtgatattgctgaagagcttggcggcgaatgggctgaccgcttcctcgtgctttacggtatcgccgctcccgattcgcagcgcatcgccttctatcgccttcttgacgagttcttctgaggggatccgtcgactagagctcgctgatcagcctcgactgtgccttctagttgccagccatctgttgtttgcccctcccccgtgccttccttgaccctggaaggtgccactcccactgtcctttcctaataaaatgaggaaattgcatcgcattgtctgagtaggtgtcattctattctggggggtggggtggggcaggacagcaagggggaggattgggaagacaatagcaggcatgctggggagagatctaggaacccctagtgatggagttggccactccctctctgcgcgctcgctcgctcactgaggccgcccgggcaaagcccgggcgtcgggcgacctttggtcgcccggcctcagtgagcgagcgagcgcgcagagagggagtggccaa

SEQ ID NO: 59 - DNA, 4258 bp, Artificial Sequence
  Synthetic
ttggccactccctctctgcgcgctcgctcgctcactgaggccgggcgaccaaaggtcgcccgacgcccgggctttgcccgggcggcctcagtgagcgagcgagcgcgcagagagggagtggccaactccatcactaggggttcctcagatctgaattcggtaccttcctagggcctatttcccatgattccttcatatttgcatatacgatacaaggctgttagagagataattggaattaatttgactgtaaacacaaagatattagtacaaaatacgtgacgtagaaagtaataatttcttgggtagtttgcagttttaaaattatgttttaaaatggactatcatatgcttaccgtaacttgaaagtatttcgatttcttggctttatatatcttgtggaaaggacgaaacaccgtcatttataatacaggggaatgttttagtactctggaaacagaatctactaaaacaaggcaaaatgccgtgtttatctcgtcaacttgttggcgagatttttttctagacccagctttcttgtacaaagttggcgtttaaacattcctattcccctgtattataaatgagttaatttgcgttctagccaccgagatacagtaacatcttttttatttctaaaagtgttttggctggtctcacaattgtactttactttgtattatgtaaaaggaatacacaacgctgaagaaccctgatactaagggatatttgttcttacaggcaacaatgcaggatttggaacagaggcgtccccagttggaagaactcattaccgctgcccaaaatttgaaaaacaagaccagcaatcaagaggctagaacaatcattacggatcgaagtaagttttttaacaagcatgggacacacaaagcaagatgcatgacaagtttcaataaaaacttaagttcatatatccccctcacatttataaaaataatgtgaaataattgtaaatgataacaattgtgctgagattttcagtccataatgttaccttttaataaatgaatgtaattccattgaatagaagaaatacattcctattcccctgtattataaatgagctagctcggagagacgacatctagaattaaactgtcactatcgattactaattttttgctcataatagaagcagcgattaaaggaatagaatcaacagttccagtaacatctcttagtgcatacatttttttatcagcaggaacaatatcatctgactgacctgtgatgctcattccaacttcattaattgttttaatgaatttttctttagataattcacttgttcaacctttacatgactctaatttatcaatagtaccaccagttactccaagtcctctaccagaaagtttacaaacctttactccataacttgcaactaacggactatatactaaacttgttttgtctccaactccgccagttgaatgcttatcagcttttaaacctgtaacctcactgacatcataaacatatcctgattcaacataagattgggttaatgctaaagtttctgctttggtcattccattaaaataaaccgccatagcaaaagcagccatttgataatctgttacattatttttaacgtaactgtttatcaatcatttaatttcttcagctgataattctattgaatgtttctttttttctataatttcactaaaactgtagttcataagtctccttttgtaagagtgcacaatatttacaccattactctttctactatattataatagaatagacatataaaaaacataaggagtacaaatggtttttgataaaaataacaaagtttatagtgaatgaataaatagccaaaaattggatgatgagttgaaaagccttttagtaaatgctactgatgatgaattgcatgcagcatttgaaggaatagagttagaatttggaacagcaggtataagaggtattcttggagcaggacctggaagatttaacgtttacactgttaaaaaagttactattgcatttgcagaattattaaaacaaaattacccaaataggttgaatgatggaatagttgttggtcatgataaccgtcataattctaaacagtttgcaaaagttgtagccgaagttttatcaagcttgtgaaatagctgttgaagctggattagaatttgttaaaacatcaacaggattttcaaaatcaggtgcaacatttgaagatgttaaactaatgaagtcagttgttaaagacaatgctttagttaaagcagctggtggagttagaacatttgaagatgctcaaaaaatgattgaagcaggagctgaccgcttaggaacaagtggtggagtagctattattaaaggtgaagaaaacaacgcgagttactaaaactagcgtttttttattttgctcatttttattaaaagtttgcaaaaaggaacataaaaattctaattattgatactaaagttattaaaaagaagattttggttgattttataaaggtcatagaatataatattttagcatgtgtattttgtgtgctcatttacaaccgtctcgcggccgcggggatccagacatgataagatacattgatgagtttggacaaaccacaactagaatgcagtgaaaaaaatgctttatttgtgaaatttgtgatgctattgctttatttgtaaccattataagctgcaataaacaagttaacaacaacaattgcattcattttatgtttcaggttcagggggaggtgtgggaggttttttagtcgacctcgagcagtgtggttttgcaagaggaagcaaaaagcctctccacccaggcctggaatgtttccacccaagtcgaaggcagtgtggttttgcaagaggaagcaaaaagcctctccacccaggcctggaatgtttccacccaatgtcgagcaaccccgcccagcgtcttgtcattggcgaattcgaacacgcagatgcagtcggggcggcgcggtcccaggtccacttcgcatattaaggtgacgcgtgtggcctcgaacaccgagcgaccctgcagccaatatgggatcggccattgaacaagatggattgcacgcaggttctccggccgcttgggtggagaggctattcggctatgactgggcacaacagacaatcggctgctctgatgccgccgtgttccggctgtcagcgcaggggcgcccggttctttttgtcaagaccgacctgtccggtgccctgaatgaactgcaggacgaggcagcgcggctatcgtggctggccacgacgggcgttccttgcgcagctgtgctcgacgttgtcactgaagcgggaagggactggctgctattgggcgaagtgccggggcaggatctcctgtcatctcaccttgctcctgccgagaaagtatccatcatggctgatgcaatgcggcggctgcatacgcttgatccggctacctgcccattcgaccaccaagcgaaacatcgcatcgagcgagcacgtactcggatggaagccggtcttgtcgatcaggatgatctggacgaagagcatcaggggctcgcgccagccgaactgttcgccaggctcaaggcgcgcatgcccgacggcgaggatctcgtcgtgacccatggcgatgcctgcttgccgaatatcatggtggaaaatggccgcttttctggattcatcgactgtggccggctgggtgtggcggaccgctatcaggacatagcgttggctacccgtgatattgctgaagagcttggcggcgaatgggctgaccgcttcctcgtgctttacggtatcgccgctcccgattcgcagcgcatcgccttctatcgccttcttgacgagttcttctgaggggatccgtcgactagagctcgctgatcagcctcgactgtgccttctagttgccagccatctgttgtttgcccctcccccgtgccttccttgaccctggaaggtgccactcccactgtcctttcctaataaaatgaggaaattgcatcgcattgtctgagtaggtgtcattctattctggggggtggggtggggcaggacagcaagggggaggattgggaagacaatagcaggcatgctggggagagatctaggaacccctagtgatggagttggccactccctctctgcgcgctcgctcgctcactgaggccgcccgggcaaagcccgggcgtcgggcgacctttggtcgcccggcctcagtgagcgagcgagcgcgcagagagggagtggccaa

SEQ ID NO: 60 - DNA, 4814 bp, Artificial Sequence
  Synthetic
ttggccactccctctctgcgcgctcgctcgctcactgaggccgggcgaccaaaggtcgcccgacgcccgggctttgcccgggcggcctcagtgagcgagcgagcgcgcagagagggagtggccaactccatcactaggggttcctcagatctgaattcggtaccttcctagggcctatttcccatgattccttcatatttgcatatacgatacaaggctgttagagagataattggaattaatttgactgtaaacacaaagatattagtacaaaatacgtgacgtagaaagtaataatttcttgggtagtttgcagttttaaaattatgttttaaaatggactatcatatgcttaccgtaacttgaaagtatttcgatttcttggctttatatatcttgtggaaaggacgaaacaccgtcatttataatacaggggaatgttttagtactctggaaacagaatctactaaaacaaggcaaaatgccgtgtttatctcgtcaacttgttggcgagatttttttctagacccagctttcttgtacaaagttggcgtttaaacattcctattcccctgtattataaatgagttaatttgcgttctagccaccgagatacagtaacatcttttttatttctaaaagtgttttggctggtctcacaattgtactttactttgtattatgtaaaaggaatacacaacgctgaagaaccctgatactaagggatatttgttcttacaggcaacaatgcaggatttggaacagaggcgtccccagttggaagaactcattaccgctgcccaaaatttgaaaaacaagaccagcaatcaagaggctagaacaatcattacggatcgaattgaaagaattcagaatcagtgggatgaagtacaagaacaccttcagaaccggaggcaacagttgaatgaaatgttaaaggattcaacacaatggctggaagctaaggaagaagctgagcaggtcttaggacaggccagagccaagcttgagtcatggaaggagggtccctatacagtagatgcaatccaaaagaaaatcacagaaaccaagcagttggccaaagacctccgccagtggcagacaaatgtagatgtggcaaatgacttggccctgaaacttctccgggattattctgcagatgataccagaaaagtccacatgataacagagaatatcaatgcctcttggagaagcattcataaaagggtgagtgagcgagaggctgctttggaagaaactcatagattactgcaacagttccccctggacctggaaaagtttcttgcctggcttacagaagctgaaacaactgccaatgtcctacaggatgctacccgtaaggaaaggctcctagaagactccaagggagtaaaagagctgatgaaacaatggcaagacctccaaggtgaaattgaagctcacacagatgtttatcacaacctggatgaaaacagccaaaaaatcctgagatccctggaaggttccgatgatgcagtcctgttacaaagacgtttggataacatgaacttcaagtggagtgaacttcggaaaaagtctctcaacattaggtcccatttggaagccagttctgaccagtggaagcgtctgcacctttctctgcaggaacttctggtgtggctacagctgaaagatgatgaattaagccggcaggcacctattggaggcgactttccagcagttcagaagcagaacgatgtacatagggccttcaagagggaattgaaaactaaagaacctgtaatcatgagtactcttgagactgtacgaatatttctgacagagcagcctttggaaggactagagaaactctaccaggagcccagagagctgcctcctgaggagagagcccagaatgtcactcggcttctacgaaagcaggctgaggaggtcaatactgagtgggaaaaattgaacctgcactccgctgactggcagagaaaaatagatgagacccttgaaagactccaggaacttcaagaggccacggatgagctggacctcaagctgcgccaagctgaggtgatcaagggatcctggcagcccgtgggcgatctcctcattgactctctccaagatcacctcgagaaagtcaaggcacttcgaggagaaattgcgcctctgaaagagaacgtgagccacgtcaatgaccttgctcgccagcttaccactttgggcattcagctctcaccgtataacctcagcactctggaagacctgaacaccagatggaagcttctgcaggtggccgtcgaggaccgagtcaggcagctgcatgaagcccacagggactttggtccagcatctcagcactttctttccacgtctgtccagggtccctgggagagagccatctcgccaaacaaagtgccctactatatcaaccacgagactcaaacaacttgctgggaccatcccaaaatgacagagctctaccagtctttagctgacctgaataatgtcagattctcagcttataggactgccatgaaactccgaagactgcagaaggccctttgcttggatctcttgagcctgtcagctgcatgtgatgccttggaccagcacaacctcaagcaaaatgaccagcccatggatatcctgcagattattaattgtttgaccactatttatgaccgcctggagcaagagcacaacaatttggtcaacgtccctctctgcgtggatatgtgtctgaactggctgctgaatgtttatgatacgggacgaacagggaggatccgtgtcctgtcttttaaaactggcatcatttccctgtgtaaagcacatttggaagacaagtacagataccttttcaagcaagtggcaagttcaacaggattttgtgaccagcgcaggctgggcctccttctgcatgattctatccaaattccaagacagttgggtgaagttgcatcctttgggggcagtaacattgagccaagtgtccggagctgcttccaatttgctaataataagccagagatcgaagcggccctcttcctagactggatgagactggaaccccagtccatggtgtggctgcccgtcctgcacagagtggctgctgcagaaactgccaagcatcaggccaaatgtaacatctgcaaagagtgtccaatcattggattcaggtacaggagtctaaagcactttaattatgacatctgccaaagctgctttttttctggtcgagttgcaaaaggccataaaatgcactatcccatggtggaatattgcactccgactacatcaggagaagatgttcgagactttgccaaggtactaaaaaacaaatttcgaaccaaaaggtattttgcgaagcatccccgaatgggctacctgccagtgcagactgtcttagagggggacaacatggaaactcccgttactctgatcaacttctggccagtagattctgcgcctgcctcgtcccctcagctttcacacgatgatactcattcacgcattgaacattatgctagcaggctagcagaaatggaaaacagcaatggatcttatctaaatgatagcatctctcctaatgagagcatagatgatgaacatttgttaatccagcattactgccaaagtttgaaccaggactcccccctgagccagcctcgtagtcctgcccagatcttgatttccttagagagtgaggaaagaggggagctagagagaatcctagcagatcttgaggaagaaaacaggaatctgcaagcagaatatgaccgtctaaagcagcagcacgaacataaaggcctgtccccactgccgtcccctcctgaaatgatgcccacctctccccagagtccccgggatgctgagctcattgctgaggccaagctactgcgtcaacacaaaggccgcctggaagccaggatgcaaatcctggaagaccacaataaacagctggagtcacagttacacaggctaaggcagctgctggagcaaccccaggcagaggccaaagtgaatggcacaacggtgtcctctccttctacctctctacagaggtccgacagcagtcagcctatgctgctccgagtggttggcagtcaaacttcggactccatgggtgaggaagatcttctcagtcctccccaggacacaagcacagggttagaggaggtgatggagcaactcaacaactccttccctagttcaagaggaagaaatacccctggaaagccaatgagagaggacacaatgtagtcgtttaaaccgctgatcagcctcgaaacttgtttattgcagcttataatggttacaaataaagcaatagcatcacaaatttcacaaataaagcatttttttcactgcattctagttgtggtttgtccaaactcatcaatgtatcttagtaagttttttaacaagcatgggacacacaaagcaagatgcatgacaagtttcaataaaaacttaagttcatatatccccctcacatttataaaaataatgtgaaataattgtaaatgataacaattgtgctgagattttcagtccataatgttaccttttaataaatgaatgtaattccattgaatagaagaaatacattcctattcccctgtattataaatgacggccggaagacaatagcaggcatgctggggagagatctaggaacccctagtgatggagttggccactccctctctgcgcgctcgctcgctcactgaggccgcccgggcaaagcccgggcgtcgggcgacctttggtcgcccggcctcagtgagcgagcgagcgcgcagagagggagtggccaa

SEQ ID NO: 61 - protein, 7 aa, Artificial Sequence
  Synthetic
PKKKRKV

SEQ ID NO: 62 - DNA, 86 bp, Artificial Sequence
  Synthetic
gtttaagagctatgctggaaacagcatagcaagtttaaataaggctagtccgttatcaacttgaaaaagtggcaccgagtcggtgc

SEQ ID NO: 63 - RNA, 86 nt, Artificial Sequence
  Synthetic
guuuaagagcuaugcuggaaacagcauagcaaguuuaaauaaggcuaguccguuaucaacuugaaaaaguggcaccgagucggugc

SEQ ID NO: 64 - RNA, 21 nt, Artificial Sequence
  Synthetic
cuuuacuuuguauuauguaaa

SEQ ID NO: 65 - RNA, 21 nt, Artificial Sequence
  Synthetic
uuugaaauauuuuugauaucu

SEQ ID NO: 66 - RNA, 21 nt, Artificial Sequence
  Synthetic
uuuaaguaauccgagguacuc

SEQ ID NO: 67 - RNA, 21 nt, Artificial Sequence
  Synthetic
uuuaaauacauugucguaauu

SEQ ID NO: 68 - RNA, 21 nt, Artificial Sequence
  Synthetic
uaccuuaauuuugacgucaca

SEQ ID NO: 69 - RNA, 21 nt, Artificial Sequence
  Synthetic
auuugacaggugagaaaucuc

SEQ ID NO: 70 - RNA, 21 nt, Artificial Sequence
  Synthetic
ucauuuauaauacaggggaau

SEQ ID NO: 71 - RNA, 21 nt, Artificial Sequence
  Synthetic
uuaaagucauuuauaauacag

SEQ ID NO: 72 - RNA, 21 nt, Artificial Sequence
  Synthetic
aaauagacacugaagaaaggg

SEQ ID NO: 73 - RNA, 21 nt, Artificial Sequence
  Synthetic
ccccaauuaaaauaaaauuua

SEQ ID NO: 74 - RNA, 19 nt, Artificial Sequence
  Synthetic
uaaguaauccgagguacuc

SEQ ID NO: 75 - RNA, 20 nt, Artificial Sequence
  Synthetic
uuaaguaauccgagguacuc

SEQ ID NO: 76 - RNA, 22 nt, Artificial Sequence
  Synthetic
guuuaaguaauccgagguacuc

SEQ ID NO: 77 - RNA, 23 nt, Artificial Sequence
  Synthetic
gguuuaaguaauccgagguacuc

SEQ ID NO: 78 - RNA, 19 nt, Artificial Sequence
  Synthetic
uugacaggugagaaaucuc

SEQ ID NO: 79 - RNA, 20 nt, Artificial Sequence
  Synthetic
uuugacaggugagaaaucuc

SEQ ID NO: 80 - RNA, 22 nt, Artificial Sequence
  Synthetic
cauuugacaggugagaaaucuc

SEQ ID NO: 81 - RNA, 23 nt, Artificial Sequence
  Synthetic
ucauuugacaggugagaaaucuc

SEQ ID NO: 82 - RNA, 19 nt, Artificial Sequence
  Synthetic
auuuauaauacaggggaau

SEQ ID NO: 83 - RNA, 20 nt, Artificial Sequence
  Synthetic
cauuuauaauacaggggaau

SEQ ID NO: 84 - RNA, 22 nt, Artificial Sequence
  Synthetic
gucauuuauaauacaggggaau

SEQ ID NO: 85 - RNA, 23 nt, Artificial Sequence
  Synthetic
agucauuuauaauacaggggaau

SEQ ID NO: 86 - RNA, 20 nt, Artificial Sequence
  Synthetic
gcacuaccagagcuaacuca

SEQ ID NO: 87 - DNA, 20 bp, Artificial Sequence
  Synthetic
gcactaccagagctaactca

SEQ ID NO: 88 - RNA, 20 nt, Artificial Sequence
  Synthetic
gcacuaccagagcuaacuca

SEQ ID NO: 89 - DNA, 6 bp, Artificial Sequence
  Synthetic
aggaat

SEQ ID NO: 90 - DNA, 6 bp, Artificial Sequence
  Synthetic
aagaat

SEQ ID NO: 91 - DNA, 6 bp, Artificial Sequence
  Synthetic
cggaat

SEQ ID NO: 92 - DNA, 6 bp, Artificial Sequence
  Synthetic
cagaat

SEQ ID NO: 93 - DNA, 6 bp, Artificial Sequence
  Synthetic
aggggt

SEQ ID NO: 94 - DNA, 6 bp, Artificial Sequence
  Synthetic
gggaat

SEQ ID NO: 95 - DNA, 6 bp, Artificial Sequence
  Synthetic
ctgagt

SEQ ID NO: 96 - DNA, 23 bp, Artificial Sequence
  Synthetic
ctctgataacccagctgtgtgtt

SEQ ID NO: 97 - DNA, 23 bp, Artificial Sequence
  Synthetic
ctagaccatttcccaccagttct

SEQ ID NO: 98 - DNA, 21 bp, Artificial Sequence
  Synthetic
ctgatgctctccaaacttgcc

SEQ ID NO: 99 - DNA, 20 bp, Artificial Sequence
  Synthetic
tgctttgtgtgtcccatgct

SEQ ID NO: 100 - DNA, 22 bp, Artificial Sequence
  Synthetic
atacctctgagattgtggtcct

SEQ ID NO: 101 - DNA, 20 bp, Artificial Sequence
  Synthetic
tgggcagcggtaatgagttc

SEQ ID NO: 102 - DNA, 25 bp, Artificial Sequence
  Synthetic
ttactgagttttagaaccagagcta

SEQ ID NO: 103 - DNA, 20 bp, Artificial Sequence
  Synthetic
agggttcttcagcgttgtgt

SEQ ID NO: 104 - DNA, 22 bp, Artificial Sequence
  Synthetic
agcaggagtcaaagtacagagt

SEQ ID NO: 105 - DNA, 20 bp, Artificial Sequence
  Synthetic
tccggagtacctcggattac

SEQ ID NO: 106 - DNA, 25 bp, Artificial Sequence
  Synthetic
ttactgagttttagaaccagagcta

SEQ ID NO: 107 - DNA, 20 bp, Artificial Sequence
  Synthetic
gagttcttccaactggggac

SEQ ID NO: 108 - DNA, 22 bp, Artificial Sequence
  Synthetic
ctgaccactattggagcctctc

SEQ ID NO: 109 - DNA, 20 bp, Artificial Sequence
  Synthetic
gagttcttccaactggggac

SEQ ID NO: 110 - DNA, 29 bp, Artificial Sequence
  Synthetic
gtagtcgtttaaaccgctgatcagcctcg

SEQ ID NO: 111 - DNA, 20 bp, Artificial Sequence
  Synthetic
gctttctctgcttgatcaag

SEQ ID NO: 112 - DNA, 20 bp, Artificial Sequence
  Synthetic
gagttcttccaactggggac

SEQ ID NO: 113 - DNA, 18 bp, Artificial Sequence
  Synthetic
gcaacaatgcaggatttg

SEQ ID NO: 114 - DNA, 20 bp, Artificial Sequence
  Synthetic
gctttctctgcttgatcaag

SEQ ID NO: 115 - DNA, 22 bp, Artificial Sequence
  Synthetic
cggttctgaaggtgttcttgta

SEQ ID NO: 116 - DNA, 15 bp, Artificial Sequence
  Synthetic
agcagaagttgaaag

SEQ ID NO: 117 - DNA, 20 bp, Artificial Sequence
  Synthetic
gatgagctggacctcaagct

SEQ ID NO: 118 - DNA, 20 bp, Artificial Sequence
  Synthetic
gtggctcacgttctctttca

SEQ ID NO: 119 - DNA, 18 bp, Artificial Sequence
  Synthetic
cgagaaagtcaaggcact

SEQ ID NO: 120 - DNA, 68 bp, Artificial Sequence
  Synthetic
  misc_feature (25)..(34): n is a, c, g, or t
caagcagaagacggcatacgagatnnnnnnnnnngtctcgtgggctcggagatgtgtataagagacag

SEQ ID NO: 121 - DNA, 19 bp, Artificial Sequence
  Synthetic
ctgtctcttatacacatct

SEQ ID NO: 122 - DNA, 52 bp, Artificial Sequence
  Synthetic
aagcagtggtatcaacgcagagtaccagagaaaatagacactgaagaaaggg

SEQ ID NO: 123 - DNA, 51 bp, Artificial Sequence
  Synthetic
aagcagtggtatcaacgcagagtacccttaattttgacgtcacacagaatg

SEQ ID NO: 124 - DNA, 24 bp, Artificial Sequence
  Synthetic
caagcagaagacggcatacgagat

SEQ ID NO: 125 - DNA, 63 bp, Artificial Sequence
  Synthetic
  misc_feature (30)..(35): n is a, c, g, or t
aatgatacggcgaccaccgagatctacacnnnnnncggaagcagtggtatcaacgcagagtac

SEQ ID NO: 126 - DNA, 28 bp, Artificial Sequence
  Synthetic
cggaagcagtggtatcaacgcagagtac

SEQ ID NO: 127 - DNA, 28 bp, Artificial Sequence
  Synthetic
gtactctgcgttgataccactgcttccg

SEQ ID NO: 128 - DNA, 44211 bp, Artificial Sequence
  Synthetic
gtatgagaaaaaatgataaaagttggcagaagtttttctttaaaatgaagattttccaccaatcactttactctcctagaccatttcccaccagttcttaggcaactgtttctctctcagcaaacacattactctcactattcagcctaagtataatcaaggatataaattaatgcaaataacaaaagtagccatacattaaaaaggaaatatacaaaaaaaaaaaaaaaaaaaagcagaaaccttacaagaatagttgtctcagttaaatttactaaacaacctggtattttaaaaatctattttataccaaataagtcactcaactgagctatttacatttaaactgtttgttttggcactacgcagcccaacatattgcagaatcaaatataatagtctgggaattgattattatccactcttctaagttgtctgtgccaatttgccttctccaatgataaggataattgaaagagagctataacttaaaaagagaaaagtaacaaaacataagatatttaaaattaccctagatcttaaagttggcatttatgcaatgccatgttcaaatgaacatgtttttaatacaaatagtgcatttttcagcctcagtgtaatccatttggtaaaattatgacatcaactagaaacattagaatacattgatgtaaatatggtttacctagctagatcaaatatactatatatcttttatatttgtgaatgattaagaaaaataatgttggaattgttatacattaaagttttttcacttgtaacagctttcaagcctttctaaagaaatacaaagttgtgctgaaggtatttaggtattaaagtactaccttttgaaaaaacaagaagtgaggcagacagagtaaggggaatttctttgtaaaataaacttcaccaattccataggaataaaagtaatttgatagtaaacaacctgcatttaaaggccttgagcttgaatacagaagacctgaattcagtgccatttgcaaatgatgattgtggtcaagccatctctggatcttcgtttcctattctgagtacagagcatacagagtacacattcacattcacaatatagttatggatatggatgtatataaatatatgtaaatactacatatatgtacctaaaatttgttttacttctgctttaaaaaaagtaattatagccacatttttcagaaaaagtaactgaggctcatagatgtcaaattcccagtaagtagcagaacaaggattcaaatccaagtccatttgattcctaagcttgtgttattacttgctactgcagagagtatacgtagcaagtaatatatgtactgcaagcaatacatactattgctgcggtaataactgtaactgcagttactatttagtgatttgtatgtagatgtagatgtagtctatgtcagacactatgctgagcattttatggttgctatgtactgatacatacagaaacaagaggtacgttcttttacaataccatattgagttatataatactcccaggacttttatttaccaaaggaaacaatattttataatgtttaaagcccaggttttgaagttacattgtctgggttcaaagcttggctcccaagctgtgtgaccttgagtaagttattctgcctacctgagcccaagtttatctagctataaaatggggatagttgtactatctgccttgcagtttgtcatcaggattaagttggttggtacatgaaaaatgcttcccactttgccttgcttactgcttactgctagtattgaacaaatgttagtaattatatttggttccaccacgaactctagaaatctaaccaatgatggcatttgtattatgcaaactgtatatcacatcataatattatatggaaatgagagcttgtttccgcttctgtagcctagtctaccattgacatagcttcctgcagaagttaccagataatagattgggagagaaagtccacacttccttgtgacgggtttgtgagtccagcatttagggaagccattgatgtgctcagtagtctccagagttctctaaataaatgtgtccttttcagaaaggactactgatttgatgccccctcacagagatcgtctttaaatataggtcaaaaactaatgtagagggccaggtgcaatgtttcacgcctgcactcccagcgctttgggaggctgaggcaggtggatcacttgaggtcaggagtttgagaccagcctggtcaacatggccaaaccccatctctactgaaaataaaaaaattagctggtgtggtggcccatgcctataatcccagctactagggaggctgaggcaggagaatcacttgaatcctggaccagaggttccattgagctgagatcacaccattgcactccagactgagtgacagagtgagactccatctcagaaaaaaaaaaatttagggggaaaaatcaaaagccatttctgagacacaaaaatacaggatttataaattatatatggtatatataaaaatatttttaaaatagtatatatagcatattatatataatgatatgtaatgttcatatattacatatttataaaaaaatctaatctcccttctcttgcttgctgaatagggggatgctttgcctgcctcttcctcttatattaaaaaataattcttaaagacattgtcagttcttggcttttatagcctcaatcaccaaattgtcggtaaaatggccctaaataatcattaaacaaatgtgtgtgagaggggaaataagaaggataagtaagtatggggaggattttgttataatttcaggaaatcaatatcaattttatgtaaagttttaaataaagcaatcccaactttaatgtttgatgtgtgaaaaattaggcaaaattccaaaagggctttataaactgaaaaaaactttactaacacctatccatttttattattttaaccaacttctattgagctgccactaagtacctgggaaacataaagttgtacaacatagaatgtgcaggtaaaagaggttgaaggaagaaaataataacactatgatagagataaattttaggataatagctaacacatatgatatgccagtcattgatctaagtacttcacgtgaattctttaatgcttacaacattactgtgaggtagatagagaggcacagtaaggataataacctgcctgagatcgaggaagaaagacaatgatgagatgtgaactcaggcagtttggttccagagtcctctcccttaaacctcatagttttcaacttctctgatattgtgtgggtgatgctgttggggctttcttcagggaaaactaagccaggagagagaatggatgctagtgagatattcctgaagaaggaaaaacttaagccaggcattaaagaatgagttggaattacctagctagataaaacgagaagggcaatccaggcagagggaacagactgtgcttttcactgaggtggaaaaaaaacagagtatatcagaggaattgtgattccatatggctgaagttaagggtatatgatgaggaagaaattgatgaggttgaatagagaggactggggctaaataatgggaatcctttgttgccagactgaggaattttgatgatggcctacaggcagtggcaactctgaaaggattgtaaacaggaaaataaaatcatcacatatagtttagttgcctatcaattagagctctctggatgcaagcaacagaaatcattctctgattaaatcaggcagaaagtaaatgtgctgtaattagcacaaaggcattggaacaaaacttacaaaaggaaaaagaatctgagcatgcctttctgggcatgtggctagcaagaagtattccagtctgtttgtgatactctcttttctccatcctgtgtgtaactctgttcaaattttaaagtcttaaaagagagtccagttcaccttgtttgggtcacatgttaatacatgagctagaagggagcagaaaactttgatttaaatccctctcctcccaaagtctcaaaattagggaaaggcaattctcctgaatagaaactgggttctattgacaatagaagaaggaaatgattctgaccaaccactaaacaataattgtccactgaactcagtcaagaacatgtagaataagttggaggatagagcaaataaaggagatttgtaggaggtaattattatgatctaaagcaagcttgttcaactcatggcctgtgagccacatgcgtcccaggatggctttgaatgtggcccaacacaaatttgtaaactttcttaaaacatgagatactttttgtgacttttttttgctcatcagctatcattagtgttagtgtattttatgtgtggcccaggacaattcttcttccagtgtggcccagggaagccaaaagattggatacagctgatctaaagcaacaggttcatctactcaacttcacaacgtgtagacctgaaataaagaccattcatataccaatacctgaaatataaatttgtttgaccatgacacgtacagtaattggttctcaataaatgtggatagcttgatggataatgtgaatgcaatgtgataaggaaacttcatattcaacaaagactggaatgtgaggattataattccaaagcaccagaagatagataagataatgcaatgagacattttatgactcaaggcaaagttagttatgagattcagaccaaaccttagacgtgcagtaattgaaatatttgccacagaaggggtataaggacatgacattcaagtaagctaacctttcactagctttagactttgaactcagaaaacatatttggtgaaaagcttatggtcccctttagtatgtattgcttgattaaagtattattttagaaaatggtgagctgcttccattttgaaataaaaataatttttactaagtgaattatattcagtgaaaaaaatggaagctacaattacaactttaatttttttaagttttaagaatacagccatttaaaaaaattaagcaaatctgcttcattttagacagtagaaaatataccattatcttttagaagaatagagatgtgaaatatgcaaattaagcctttagaagtaaagcacacatgaagttcaaagtttaatttctagaattgtgaatcaatagcagtggatgatttgtactttatagcttagtgtcggagaaatctgattaaaaaatgctttttctgtttcatcacataaacataagtaaaattgctctgaaacaacaatatttgacaagaattagcagttttcttttttgacataatctatcaaatgaagggaaaaatatgtcctgggttttgctttgagagtgattactaaatctgacccttaaggaaaggaaggagagaacaaagaagggaggaaagaaagggaaggaaggaggaggaaagggaaaaaaagaaggaagagaggaaggaaagcaggaaaaaggggaaggagagagaaaagacaaaagaaaggtagcaaggaaagaaaaaaagacaagaaaggaatattaaagaggacaaaagaggagtgaggaaaggaggaaatggaagagggatggtgggagacaggagggagaaaggtggagggggaaatatgaagagaggttcccagcagtggagactagtgttgctatcaacaaatagaatttagatggccatatgatattatttttcataatactggtgtctgattgcctgtgctgagttaattgtagtcttttttttcaattccgtttggccaggtgttcaggataattcaccacaaaatctcaaccactgcacttgtattgaataaagaattgagttggcaaaggcattttatcctccagtaagacctttccagattggggttgagacaaattggccaatctggacaagatgataatagcattgttcaagattaatttttaaccacacattgcactgttacctgggagatttcattatctaaaaattgaatgagcagttttagtgggtatagtgtatatttaaatgggacataattacttgaatgagtttaatttttgttgttgttgttaaggtcaaagtacttaaaaattatgattttttaaaactctgtctatacacaaaaagcatttgaattagctacagaataattctgattataacttttggtgaatagattcagtcaaaatctgattactaaacaacttgtgtagtatagccctggaagaattgatgggacaatgtgtgggtaaagtggcattggctatttaaactaaaagcaatacaaaacagaatgtttcttggttttattctgttgtcacaaacccagcagaaagtggctattacaatagtttcccttattcaacaaatgagagaagttatagacaatttagttaattgatctaaagtcacttagtaaatgtaattgtcctaacataaacccagacccccagacctcttgggaatagataatgtttcttacttcttttctatttcctcagccacccccctcaacttcttacacatctcatttctccatccaaattataacaaaacaaagcaaacatggtttatttccatgggcatcaaatggatttcacgaggttgggtgacagtcatcttagggtgaggagattgattattctgtttttctctttcatcgatcaacaatccagcccttctcatctcatcatttcatttctgcacaaacttgtttaagaaataccaattaagaaattaattaagaaattaatgttgtaatctgtttggctgaagatatttacaaattttgtgctttaattatcttccaacaaatgtacatgtctctggtagacagcttgcgaccatctggatgactgatccatatttatataattttctttctttacctaatgagaccaaatccactattatcttcaacgaaggatgtaaagatatgtcagtgtcagtaatgtgacttattttatattctctggtcataacaaaaataaaccgccccttaaataaaaaggtcatagagttgcaaacacacacacacacacacacacacacacaaaatcatattttctaagtctcctaattacctttttatggaaaatgataccatatgcttttttcttaaagaaactacataaacttataaactatactaaactacacatttcaaagtctatgaatggaaatgtgtatcttattatattttaattcaattcactgtaaacttttctgtcaaaatcttatcaagcaaaactgatccaggatatttacatgaattctgatggaagtcactgtactgtgttttccataaaataccagtgggattctgataaggaagtttatgtttgccattgtgtttaaatagagaattctgggccgggcatggtagctcacgcctgtaatcccagcactttgggaggctgaggcgggtgtatcacctgaggtcaggagtttgagaccagcctgaccaacatggagaaaccccgtctctactaaaaatacaaaattagccgggcgtggtggcgcatgcctgtagccccagctactcctgaggctgaggcaggagaatcgcttgaacccgggaggcagatgttgcagtgagccgagatcacaccattgcactccagcctgggcaacaagagcgaaactccgtctcaaataaataaataattagagaattctatttacaaatttcctttcttggatctagttagggctcctttatatggagtgatttttattgttttcatagaaatacgtagaatctgggtcttctctaactttcttacaggaaagcaatgtaataaggtttttttttaattttctgaaagttatataatgttattgttccctaaagtttaggacctgccttttaggctttccatttcaccataacttttggtccttaaagtctgtaattgaagttacagtgtgttatgatgtaaatttttcttattattacctttaatgttagggtaatgttaactaatgttaatgttaggtatatggttgtttttttcattccttcgttcaacaaattgtctttgaaacccatgttacaaagcactctagagtcaggttgaagactattaagaaaggagaatagaaagagacactagagtaataatttggatttaaatttgatttccttgtgtatgatagtgaataagtgtgaataagatgaggcagtgatcacacatcactattagtaaaagtgtttctgtacctgtatccacacttttatgtatatggttacttatgttaaagtgatacatattatataaaattaacgtatacattaagtagatattttaatagtctgtaattaaatactactagtattttctttcctccttcaagtgcttacttttgatacctcgagttacagtgtcataaagattctttagaaatatattgactgtcttttaagagcttttgatacaatactgagtttacattcatctgttatttattgaacacttgctggtgaaaggcatcagtgttatctgctcttagggaacaaaaattaaaaagggataggccctaattttagagtgtatcctctataagaaaaacataaaagatagggcagtcatggccacaaaagaaaaaagtgttatggtggtttcaatcatatatgtattagaatgaataaatcaactgatcaattgtgatttcttattctaaatatgtgcctgcctttttcatatagatgaaaattaagctatgtttatctttccagggatcttgttgatttttattcaataacttgggagtgaaagttgatttttgcatatgttttaatgtttttaaatttcataaatgaattgatcagtaatttccaaggtagtaatggctgcattgtttttgaaaaaaaaaaagcaacaggatttgattgtgcttttatgatttttaaagaattcattaaaaataatgccacggtttctaaaatgatttgagtcaatttcttattcgatttataaaaataactttgaatacaattttagtaattcacaaatgctttcagttcccttacctttatattttatattctgtgtaaacaagtgacataatatttaagaattatatatctcctatgatttattcaagaaaagaatatatactgtattatttatttcaagaacagaaatgctttgatttaactgtcatcttctctcttcaattatggaagcaaaataaactgtaatgaccaatgtaacccctcccccatatcaagttaatctatgttcaactccagaattatttttgaacactcaaactagaaattaaaaaaaattaaatccatgaagacgatttttgccaaaagcatatagataaattgagttgattctatacttaagaaagtggagaggagagagtaatttggagagagtaatttactcttaatcccatattttttccctaaatgtgaaagaagtagattgtagtgagagggaaaataacctgtagcaacttcattgaggctaagctttctgtcatgttatattatacgaaagtaatgaaatgcttccacagatagaatcagaagtcccctctgagaaattctacataaaaattagcctgccactttaccacacttactcaagtttgatttttttaagttatgtaatagatgttaggcactagaagaggacatttactgggggcaaagatcagtagttggaaagaatgcaagcaggcaagaagctatatataatgagattttacagtacaattgttttctaaatgaaaatgaggacgggtccagacacaatggctcacacttgtaatatcagtgccaggatggaggatcccttgaggccagaagttcaagagcaacctgggcaacagagtgagacttcatctctacaaaaaaatgaaataaaaagttagctggctgtgatggtgtgggcttgtagccttagctactcaggaggctgaggtgacatgatctcttgggcccaggagttcgaggctgcagtgagctatgatagcgccactggattccaacctgggcaatggaacaaaactccatttctaaaaaagaataaaatataaaactaaaataataaataaataaaaatgaggatatattttattttaacatttggaaactttgtaggtgaggaccatgcaaacattcaaggtgtgagttctgaccaaatccaattattaaccataccaatgacttaaggtttcttcacactccttaaagttgattaatataatgattatatagttgactggtatgtcacagcttgaagcctttgagatttattcctgccttttctgtaaaggttgttttgttaattccagtatgtactggtcgtttttgttttgttttgtttttgtttttgttttgtttttttgagatggagtctcgcactgttgcccgggctggagtgcagtggcacgatctcggctcactgcaacctccgccacctaggttcaagcgattctcctgcttcagcctcctgagtagctgggattacaggcactcaccaccacacccggctaattttttttatttttagtagagatggggtttcactatggtggccaggctggtctcaaatacctgacctcatgatccacctgccttggcctcccaaagtgcggggattacaggcgtgagccaccgtgcccggctgccaatatgtattggtctttttcatcaatgattcagtccaaaatcattttgtcctttaactatatattttcttgtaaagctgcttctgttgtcttgaacttttcttttcaaatgtatgttgtcatttgactttttagattgttattttctggtcctcgaaataaatttaaatttcctgtaaaggaaggtgtaatattctatttgacatagccgctaaagatgtactaggtgctttataaatattgttgatttactttatcttcacagattactagttttacttagtatttggaatatgacaacattttatagagctatattcatatatatgtttatcttaactgttaaatgcaatatgattcatgtcttgttttggtcaatgatgaatgaaagtctcctgagaattaaatttactgcatcgatgcaaaaacaatcataattttagacactctaagaattttagaaattaaaggattttttttttccagtttactctgttaagattgtgtttagctatgcgtgacagcattctcactacagtggcttatccagatagtttctttttctcatagagcaagacttccagaattatgtgttccagggtcagtgcagcacctccaaaaccgtatgtcccaactttttcctccaaccccagtcatctccaacatgagactttctttttgttttgttttgttgtttttgtttttgtttttgttttgagatggagtctctgtcgccaggctggagtgcagtggcgcgatctcgactcactgcaacctctgactccctggttcaagggattctcctgcctcagcctcctgagtagctgggattacgggaacgcaccaccacgcccagctaatttttgtatttttagtagagacggggtttcaccatgttggccaggatggtctcgatctcctgacctcatgatctgcctgcctcagcctcccaaagtggtgggattacaggcgtgagccaccgtgcccagcaagactttttttcctgtggtctcaacatggctactctgcctccaggcactatgtctgtactttaaaatggaagaagggaaaatggggaaagtaaaagcatattccagctgtgtcagctcctgtttgtaaggaaaaccagtgcttttctggcagccccacacagaagagtttctacttgaacagtgcattaaccagaaatgtgtcacgtgaccattcctaacttctaaggatcttgggaggattgagtgttttaactgaataggtgtgtttctttcttcataattcaaaatgtgaaaattggtaacttagttataaaaccttgctagtctgaacagaatttggatttttttagctaagaaggaaagaaagggtatcggataggcagctggctatgctagccaagatactcttaataatgcacatttttcttctttggacataagcagttttaacttagctaaatatgatgtgattgttttcctgtcttcttagttctgtttaaatttgtttcagaaatcaaggaaataaaatggagaaaaaactctattattcatgtctatctttctgcctctgaatatttttatgttggagaaagagaaagcagtaactttcataatagcttacatagtctgacaaattctaaacatgtccgttagcatcaatatacgtggtattaggtcatcagtttttatattctgaattattaagacccaaataaacccactgagttcaagagaaagtatacactgagcaataaaaacattaccagttctagcaatgataatcaaacaagaaaacaagtaatatagtctgtttagaataacatgttttaaagatcaagtttttcttccttaccaatgttgcctttcttgtaacacttttttttccttcttgagataggctttcctatcttttgtcacaaaccccaatatttacatggccattcgtagtctattcatagcagcaccaccccatggcccaaacttgtagatattgccctccttctatggttgttctaataagaataaccactcttgtctctcataatctcagctgttttgtgccgttaaaatggaaaataatgagtattaagatactaactaggggccaggcgcggtggctcacgcctgtaatcccagcactttgggaggatgaggcgggcggatcacgaggtcagaagattgagaccatcctggctaacacggtgaaaccacgtctctactaaaaatacaaaaaattagccaggcgtggtggtgggtgcctgtggtcccagctactcgggaggctactgcactccagcctgggcgacagagcaagactccatctcaaaaaaaaaaaaaaaaaaaatactaactaggtttcagtcatatgagatgaataagtcctacaaatctgtacagcctagggcttgtagttaacaatgttttatatttaaaactttgctaagagagtaaatctttttttacctgttattatcgtacatgcaaaaataatagtaaataaggaaggtaagagaaaaattttggaggtgatgcataggtttatggcatagattctggacatgatttcacaggggtatacagtcatgcattgctcaacaacagatatacattcggagaaatgcatggttagctgattgatcttgttgtgcaaacatcatacagtgtacttacacaaacctagatggtacatcctactatacatctaggttgtatggtatagcctattgctcctaggctataaaccagtacagcatgtgactgtactgaatacttcaggcaattggaacacgatggcaagtatttgtgtatctaatcacatctaaacatagaaaagttacagaaaaatattataatcttataggaccactgtcctacatgtatacagactgtgcacatgatagtggtccattgatcaaaatgtccttatgcagcacataactgtaattatctcgaaactcatcaagctgtgttcattaaatgtgtatagctttttatgtcaataaagtggttaagaaatcaataaagtggttaaaaaatattttgactaggaaatatactatcatttctagttgataaaagatctcaacatttccaaaattgtcctacagaaaaccaggttcatcaggtgttcatacatgatcctcatgaaaaggtcaaataagctgaaaaacatgcatagacgttgcctatcctagcaatctatgatgtacatctccatagtaaggtcactgaaaagtcttttaggaatgttagtattgttagctcagtatttctcagtgatttctccatggaaaccatttgtgtagagcatcttgaggagcacagctgagagaacattatcttagttggatgtgtatgtccctctgagtcacttgatttctctacatatgcttttaccaaattaatcttttagaaatcttttctcttcgcactatgtctataatttgtgaagttgttaccaggataacatttgtgcctctcaccatgatgtacctaccagggtccaagcagccattccttctctagagcaactgtctgagggaaagaatttaacacagcattctacgaaatcattttatttataaaaatagattactgctttacatatagtaatttatatttagaatattgattaattattaaaatctgcatgagagctttaaagagtagtacataatatatagcagtttgtactcaaactgtcttctaaaaaggattcactttttgtttgtattctattgtcctattcgttgatagtgttacgtaagtaattataaaacttaaaatctggaaagagaatgtggactcagaatgccatctcttttgttatttcaaatggattagaaatgaacatacatattcattttctttcattacacatccagagaaatagaatggattttataaatatgtaaaagcaaggattttgatcactgataaaaagggaaggtttggtcactaccttatttcattccttttttcttatccttttttttttttttgtcaattatttgatgacatctctgaacatcaccttttattcatgacaagaattgggtatcatggtaaagaacactgttaatataattcagttacttcaccccctcctgaaatatagagaagctttaagactatgtgaatatttttttctggttttcttgtatttgtagaaatagcatgagctttgtttaaagtcaggcatctaaaaccttgccctgtatgttattgacaacctgcacaaattttaggatctattctattacagtttgttcaactgtaaaactaggatagcaaactctatgtcatattttcgttatcagaatttaaaaagcatgttttaagatcttagtaaataataaatctctactctgtagttgaatttgttctatattctttaagaaattccctttgatggttatgccaacctctgtattacttttcttcacactttaactttgcgctgaaatcatagtagtattttacgttatcagtcaaaataacagtcatccttaaaacaaatatgaattttagatgattaaatagatttgtatggaggttcttcttgctaatcatagcagttatccttggtgaaaaatgatagacacttgaaaaaaccaattaatcatgatggctatttttgcatcataaataaagctttcaaatttgagagggaatcaaaagggcaatggtagtatagtgtctcaaagcccctttccaattgatggtacaaatttaaaaagagagagagagagagaaacatgtttcactgtaattgttttctaagagcttccaaaaaagcgtattttcttaatagattcaaatttttcagttggattgaaagggaagtcttggagtgtagtgaggagggcaccttctgttgagaggtgttcagacgacagagtgtgcccaaggccaaagatgagatggttttgcgaaagtcagtggccacaaacaggtgtgtttgacccctgagagatatgcaggaagtctaccccactttaattcttccaaatattctttaccttaattcccaagtacttgataaaggagcaatggggagaaaatatgcacactattatggaaaagttttgacctacactttggagagttttagattaagagcattctagaaatcagtcccaaatgcctagggtttacttacttaaagataatatcatagtttgggtgactgggaagcataccctgagattgaggtgagcatgcagtatgtctatttaggagtgttcttggggtcaacgtgtaggggcagagggagaagttgagctctgacgcagtcttagtaagggcctcagctgaccgttcagggagttcttaagctggaatgacccttcagaagtgctaggaaacgaagaaaggggactggatctttataaccccgtgtcaagtcatgcactggatgtgggctactccaggaaggcaacgaactttagcaagatgattctctttagccacgggaatttccataagggggctgctatggtctgaatgtttttgtccctccaaaatgtgtatgttgaaacctaacactcaaggtgatggtattagaaggtgggggtttgggggggtgattaggtcatgcgggctctgccttcagaaacaggatcagtgcccttataaaagcggctccagaaagcttccttgccctcccaccatgtaaggacacaccgaagatgccatttaacaggagtgggccctcaccagacaatgaatctgctgatgtcttgatcttggaattcccagcctccagaactataagcaataaattctgttgtttataaattacccagtctaaggtatttagctatagcggcccagactaagacaagggctgacagctgaaggctgtctaccagcagcactcctagcagctggggaactaagtccttcatttccaaaggggaatctaggcagcatatttacagcttttcactacagataagctcattatttcaaatagggactagcaggaaaaaattaaattgcccaaaatttagtgggatgctgaaatagattgtggtgtgtaaattggagtatagtgaggagagcaccttcaaaccagtatgtactacatgatattgtttttgttgcaatatttattatatacccaaacacacatatattacttttagaaacacacaccacatatatatctatgaatattttatatacacatagggaaggattgttgatgttatttatgctattttaaagatcgatgttttcatataattatgtattggttatatattatttcttgatataaggtaaaaaaaaaaagcaaaacaaactttaagtgatcactatgaaaagaatcccaatgctgcacatttaggtttatccaactcttcccattaaaatattaaatagtagaaataattgtgaataagaaagagcagattttgaaaaatggaaagaaatgcttaaagacatagcattgttgcccaaccatcattatttaaacatacagtgtttggctttgaccaaattgccttcaaacacttccttttggcccaaaatgttaggtcatatatactaccataaaattcatgatgcttaccatgcattaatttctagtatataccaggcattgtgctatgcatatcatattcaatatttctaatcctctcaaaagtggtacaagctaactggcgtttttcttgttttgaaagggagaaactcagagaggttaagtgacttgcccaaggcaatgccattgataagtgccagattctatcacaggtttattggcaacaaaccatatgtgcgcgtgcatgcgcgtgtgtgtgtgtgtgtgtgtgtgtgtacacatacacgaataacatatatggtataaatacgtggaaacataataaactgcattgagctgcgtttataattagtatttaggacatgtttggcaaataaaaacagtggagattgaaatggatttgcttaggaaaaatgatacattaaaataggctttattatgagtcttcaactattctgtgaaaatagatacccagggaagaaataatagagaatatgaatcttgagcaggcaactgagaacttgtcgaagagccaagataaaaatgtcagagaggagaatattttggcagctcagatgagcccccagagggtgggaggcaatgatctcaccgcagtctcgtatctgaaccccaggtttttgcatctccataaagtaatttcttacacccctcaataatgatcgggcttactctcaatctctcgctctctctctgtgtctctctcacgcacacaaacatgcagaacatttcttgcacatgcataactcataagacgattatgtaaataccagcctttttatttcataactaaattacaaggcctggttattgtttggactgtgaaaaaataattatgtgaataggtgcctcaagatgaaagacaaggcaagattgtgaaattattcatatgatagtaatagtatgcaaaaaataacacaatctttaaagatctttaacgacctagttataaaaccatgctttataacaaatataaccatgaggaaataaaaagaaaaatgtaataatatactccaagaataaagtcaaatgtattgttgaatgtaaggagttggttacacttccttatagtggaggttattttaaaatttgtggcttacgtggtgttatgaattgccctagatcaacactattatgcaaggccaactattaggttatttttggtagataaccacagcaaaactttagtataataggtaaaggttagctacactcccataccctcactctcaggtgttgtcatactccgtataaaaggttcaatcaagggagacatgagaatattccagaatctagaggcaggatgcagttaaccttagagaaggcatcagacaactagaatcttcggattcaatgtggaaacaaagcatagtttaggcattaaatcttgggcaccattccaaagaatacaggttccataacttactatatttttatacctagcaagctagagatgaggaattgctctcaaatattttaaccaaagcatgtatcttaagtaacactaatctcataagtgaaaactcatttctaatattcattttgctcattagcaaggcctctagtgttgactgtgataaaaaatagttcaaatgctggtagaacccaccccaggagactggcctttctgattaaattctaactctatccccacgtgaattcctgacttaagtaactgagttcctgcacatcagaatataagtatattatagatataaaaacatatgtaattaataaatattttaagtgagacacttctttcatctttatggcttaactatatcagacatttgattatttttagcggtctaactacaaaacaaaacacaaagcccacaactaaaaatttctttgtatatattgcaaagaggcaaccatttggtgtcaattcaatcatgagtgaaatgctattatacgagtacatctccctggcttgtatgggggtaatagggcatggaatttacagattcacaataactgagatattcacaataacaaagatatcaatatgtagcttttcccataactttgtgtaatgaaatcctcagtttgtgctgtgtaaaaagcttattgtttacttctcatgaaaatcatcttagtttttatctttatttaatagtctgtaatttgggggtaatacattcgttttgttgatactatgtgaagtggcaagcagaaaattctaacaggaatagataagcaagtatcctataaatcagagtcagtgtctctctctctctcttttaatgagtcagtctgtctctctctctttttccctgcctggctatctatctgtatttttcagttttgctttgcaaataagagaattgtgtgttgtaaaccaaccaacttaccattaattttctctgaattcaaaagcaattacaagcggactcttgagtttgtgctgcctggttgtctgcatataggccagatgtctagaataggatctttatttactatttttaccctcctaatttcatggtaactccaaggtagatgatatttgtaatcgtacactacttgtcagaaatctttctaataacactgctattttataaaaataaacattaattcagtataaaattttattttaaattgttaattcaagcaaatcagtgaggtaacttttacactgccgagcgtacgtgtgtgtggattagtacagccatgccatagacttcacttgtaatcttttctttatattttttatacacctgaaatgttcatcattgtgctgtagaaaacaatctcattgtgtttttaaaagctagagtgggtattgagaaggggaagaggatcatagaaaaagttggttaacatgctacttaacacttcaaatctttactcgatgtcatcatcagcaacattttaaatttatgcttctactagtttgcagttcttttcctttgattattcttatgatacaagcctttccacacaaaatttatgtacaggaattgtgtagaatttttctttggaaaatatggtgatttattacaatttgggcaacatcatcattttaaaaattcagaatttgatttttctcagaatcatcagaaagaataaagcatatatatggttcatgtcaggagaattagaacatgagaattaatatatctctgatcttttaaaatattttcatgtttgtgaatcagcagatttttcctagtttgagatttaaaaaatctagatataattaaaatctcactgatgtttcaccatcagatgattttatatttgtattttcttccacttcataacttgtatagagaagaatagaagaaagaaaaagggaggattgataatctttctctctcagttcttatagcacttcattttttaaacttattacttccttctgcctgctttgtttgtctacatgtttgtatttcatgatttcttagaaatccatctactgccattctgaaggtcatttacctgaaaatgatagaaagcagcatatattcaaacaactgcagagtaattgtctatatcagttatcattgttcattacttttctgttttaggattgaggggctgcctcgccacctccctcacacccccagcatattatcacaaagcctactgattcattcacatccctgggctgaatttgccacccactgtgtgttcctgttgttttgtgtatggaagtgaaaagatttaatttgatgttgttgaaaagacacagaggctaactttcaattttcatatgtagttcttccctctccctctgcaccacctcctttacttgttgagaaaattgccctctccatggtaacaatagaagaagctttcagattttagtagtagttgttgcagagaaaagaattcaaaaagtagatgaagtttaaaaatgaaaaagagagaggaagacagctgggaagaaggcttaatgtttatgagtgggtgtggaggggaagaactaagttgaatgaacaaagctgagctaaggggaagatggtttttctgcatcccagaaggcaataccctagcctttcctgcagccttcactccccaaaagataagagctttatctgaaattcttataggattcattcctgaagagcagcttgtcaccaaacagaaacactgtgatttcctcagggagtcacagtttattattatttttttaatgtaacgcttttgtgaactccagtttccacctcaattcaaatggtcttttggttacagggtgaaagagacccaacaatacacctttcccacttccggaggcctttggttaaaccatgtctgccacaaggacacaggagcctggtatgactggttgttttttgtttgcttttttgcctcctgtgctttctagattgtgagatactgtaactcttgtcgatgacacatagtaccgaacccacccgaagaagtatgtcagtatgtcacattgtgacaaacagcttctcatgctaagtaaatgcagaaccattgtgaaaggtttaataatgcccactcctcccccgccaaagatgtccatatcctaatcccaggaacctgtgaatatgttaccttacatggcaaaaggctttgtattaacagatgtggttaagttaaaaatcttgacacggagagatagcctgggttaccccagtgcgcccaatgtaatcacaagagtcctcctaagagagaaggaggtgatgatacaagcagagtaaaagagagattggaagatgctacactactggcattgaagatgaaggacagggccaagagccaagaaatgcaggcaggctctaaaagctggaaaaggcatggaaaagaatcctcccctacatcccttagagggaatgcaagctctgccaacacattgtttctagcttgtgagacccattttttggactttggacctccaaaattgtaagataataaatttgggttgttttaagccattaagtctgtaatcatttgttacaacagccacaggcagctaatacagccatgaacatttagtaatgactaactttgcacaattttaatacaagcttcttattaaggtttattttttcttaattacaaggaataaaagtggggtctgggggcaatgtcatggtccactccgttttagccatatgaatttgtatttccagcattagaacaaaaggtgacaaatctgaatgtatttgtgtgaaataataataaagcagaacaaaaagggaaaagtgtccagctggaaatgaagttagagaaagatgaggagaagcaagccaattgtgtagttttcccttctgctttttaaaatcatgatttgtttaacccactgaattctattttagaaacaggactgcaaggaagtgttgatggatttggtggcatgagaaccagagtcacagaggcaggaaagtaaggaataagtgttagaataggaagcagagttgcttgggaagagaccttatgacatgtggacagggctagacttaggagtcagaaagacctgagttcaaatgctatcctttagtatagtttgaagtcaggtagcgtgatgcctccagctttgttcttttggcttaggattgacttggcgatgcgggctcttttttggttccatatgaactttaaagtagttttttccaattctgtgaagaaagtcattggtagcttgatggggatggcattgaatctgtaaattaccttgggcagtatggccatttacacgatattgattcttcctacccatgagcacggaatgttcttccatttgtttgtgtcctcttttatttccttgagcagtggtttgtagttctccttgaagaggtccttcacatcgcttgtaagttggattcctaggtattttattctctttgaagcaattgtgaatgggagttcactcatgatttggctctctgtttgtctgtcgttggtgtataagaatgcttgtgatttttgtacattgattttgtatcctgagactttgctgaagttgcttatcagcttaaggagattttgggctgagacaatggggttttctagatatacaatcatgtcgtctgcaaacagggacaatttgacttcctcttctcctaattgaataccctttatttccttctcctgcctgattgccctggccagaacttccaacactatgttgaataggagtggtgagagagggcatccctgtcttgtgccagttttcaaagggaatgcttctatagtacaaggctacagtaaccaaaacagcatggtactggtaccaaaacagacatatagatcaatggaacagaacagagccctcagaagtaacgccgcatatctaccactatctgatctttgacaaacctgagaaaaacaagcaatggggaaaggattccctatttaataaatggtgctgggaaaactggctagccatatgtagaaagctgaaactggatcccttccttacaccttatacaaaaatcaattcaagatggattaaagacttaaacgttagacctaaaaccataaaaaccctagaagaaaacctaggcattaccattcaggacataggcatgggcaaggacttcatgtctaaaacaccaaaagcaagggcaacaaaagccaaaattgacaaatgggatctaactaaactaaagagcttctgcacagcaaaagaaactaccatcagagtgaacaggcaacctacaacatgggagaaaattttcgcaacctgcttatctgacaaagagctaatatccagaatctacaatgaactccaacaaatttacaagaaaaaaacaaacaaccccatccaaaagtgggcgaaggacatgaacagacacttctcaaaagaagacatttatgcagccaaaagacacatgaaaaaatgctcaccatcactggccatcagagaaatgcaaatcaaaaccacaatgagataccatctcacaccagttagaatggcaatcattaaaaagtcaggaaacaacaggtgctggagaggatgtggagaaataggaacactcttacactgttggtgggactgtaaactagttcaaccattgtggaagtcagtgtggcgattcctcagggatctagaactagaaataccatttgacccagccatcccattactgggtatatacccaaaggactataaatcatgctgctataaagacacatgcacatgtatgtttattgaggcactatttacaatagcaaagacttggaaccaacccaaatgtccaacaatgatagactggattaagaaaatgtggcacatatacaccatggaatactatgcagccataaaaaaggatgagttcatgtcctttgtagggacatggatgaaattggaaatcatcattctcagtaaactattgcaagaacaaaaaaccaaacaccgcatattctcattcataggtgggaattgaacaatgagaacacatggacacaggaaggggaacatcacactctggggactgttgtggggtggggggaggggggagggatggcattgggagatatacctaatgctagatgacgggttagtgggtgcagcgtgccagcatggcacatgtatacatatgtaactaacctgcacattgtgcacatgtaccctaaaacttaaagtataataataataataataataaaatctcaaaataattaaaaaaagaaacaaacaaatgctatcctgatcctaactggctggctgtctttggggaagttggtaatcttttctgtgcttatttcctcatgtgtaaaaaaatgaatatagtacccagctaggtagagttgttgttgggattaaatgatgactataaagcatctagcccagcttcggctacattatagctgcttacgaaattgtagttacgatgtaaaagagaaaaacactggaaaaggaggatatgggccattttattccaccttcaccaccttttagcttggtgaccttgggcaaattatgcttcattccgtgcttcattttccttgtctataaaagggtgtaagtacagaaccattgaggggtggtcattattaacctacctcaaatggtgtctgtaagttaatatatattgtgcttttcctatgtacaatatctagcacataattacaaatcaaatccatcccatgtgcaatatctagcacataggaaaagcacaataactagttattactcttgttgtagtaattgctacgctgtaggagtttgaattgtaaggcagtggagagtcactgacctttacgagaaagtgtagcagaacatttgagtagatagtaatggggaatattacataaatggatagatattaggggcagatattactattaaaatattacagcatggatatttattaaggccaaactggttaattagttgcatctctcaggttcctaatgttgcttaattttttaacctcccattttgtgctgccctttgtacgaatatttaatgctcccaacacctcttcagtagcacatgtactgtgagtttgttttgttattacttgtgtgtattagcattcctttgtgaaccaaaagcatggaattagctgttgcctctaggctacctagttttgtagtttggattgaagccttcacctcagtaacacctattctgtctactatcttacagaaaacttgtaaaattaagacagatcattaatatagcagaaagagacaaagggcagagaacattgagatactggatattggaaccacccaatagtgttgatttatttatgattatcagtttttgtctctgcctagcctcatgccactaaagtctctgaggcaacaaagaataagcaattttgctcaccttatacaaataaaacacagaaaaaggaatcactagagaaatggtactgcagcctttctgcagggattactgcttatttttaaattacttaaaaggtattgaaattattgttcataatgagaaacctgcctaataaaacagaaaattaaacttaacacttccctataatgtaaacagctcggttaggaacacaacattacagaaaccacttaagaattgattgtacttgttcttggagcagaactagaagctcaccgtttagaagctgtgcacatttccctatcaaacagtacataaagtttccatattcctcagaatcggcttcatttgtgccatgtgtttgcttggaactatgccacagaaagcagttctccccctcaagctgggctcctttcatgccgcagtgcaagtgtgtgatatactggcaccatgtgctaatgtagacccatttttatatgataagaattagtacggcctagggaatagacaagtatgtctaaaatcctccccatagaatatgtcccttcctttaaaagctgtcatactgtaagttccagctgagttaaaggccactgtgctcctatagggaaatatattctattgtaatttttacgttctccaataacagtctgttctttgtttactgaagagagctttcatgtcataaaatggtgttttttgacagagaagcagaatcattgttttattatagaaatttgctcttacaacagcaaaaataaatagctcatctcttaagctcctgatcaatgtctaacacctcctacccccagcaacacttcactgcaagtatattaacactctataatagcaattccactcacctaccaagaaatgatcttcacaaatgatttacagctaaaccagagcttaaacacatagcacccaatcaagggcagatttttatctttttcccagtcatataagttctgagaagaaatagattaatgttgatctcccagacaactgctgagaaaatgtacaaaggatgttgtttattttgaagaatgagacctagttgttaagcactttttccccttatatgtacgtccaaaggtaaccattacaccattttgatgcaaatttaggatatatatttattcatacctctcttctccattcggatgttgtctgtgtgagtgctcacagacacatgcacacatacacacatgcactcctgtttcacacttatttgtaaaactcacaaggatttccaagccattaatatagcattgtttaaggtgaacacatggttgttcaccatccatatgtatcttcactttgtagcactcagaatttggcaaaatcagaaggctgaaacctcatggattaaatatattctatataacatatgtcttaattgctgttactgtaaagaaacctggactagccatatttgactaatttctacctaaggtatttgaattcttataaatagattcattgctttaatcacacaagagtggtttatatgaatgtaattatctccactttatagctgaataaactgagcctgattctatccctatatgggaaacatgaattgaacagctgtgccaattattttgataattcaaatttcacatctaccatgtgaagacagcagaagagggttagggggcttgaattattctgattaactgtgttcatgagtgtaatcgcctctagataatcactcatttcttcacttcacttcccatctacaggtagtatcagcgaatggtaacatctcttgctttgcctcagtttattgatggctgccgttagaaataaaaagcatggttttgtttcagtacttaaatgaataatatcttcaaaatgtttttaaaacgtgaaaaggttgaatgcatttttaacaaatgttttgttagctttgacttttatttttgaacagatgagcacaataccccagtactcctttcctagaaataggagtactacctgaagacttatttcccaaagaaaaatatcaggtctagtgcagcaatacgtattaagggcattgaaaagttatattcacaaaatgtgacatcataacatatgttaatacttcttatcactgataataatccttgaagttgtatttccagagagatctcaatttcttctcacactctgaaagtctctgtttatcctttagagtaggaatgtaagaatttaacaaaacattctgaatgtttaccttttttctaaactgaaactacaatccctttttacccctatatagtaaaatataatattacaagtagaatcagcaaatttgtttaataattctttgggacagtttttacaagcaatggggttgaatttatgttccttgtgtgcagtggagttattatattcttcttaaaaagatgcatgaaggtaaattagaaatgttttacatgttttcatgacaggacatttaatcaaagaggagatacaagaggcttttcttgggttactgcaatttaattttccatttctttcttggaagggacattggatgcagttgtacgaggttaatatttctaacatgccacttttattgtggcattcttctgctctcaaacctctgatgatttcccatggccttcaacatgatgtccttatttgggcatctagtgttctgagccctcacattctggccccagcttcccttctcaacttgatcacagccatcgtaattctgctaactaattacacagctgcccttcccactctttctcaaccactctgctgtattctgacttctacactttagttttaaagctactccttgtcctgaaattccttctcccattaggtcattattaattgagttcatcctctaagttacagttcatgttgctgttcctctatggcaccttccctgaacctggtcccatataaaatcccatctctcagaatcccattagggtaggatatgtggtctgtagactattacgtttgtcatttacatattgtcttctattattgggtaactgcgtgtgcgagcatgcatgggctggcctgaaggtcacctccccaactgcattgaaagttcatcacaagttcaattatttcactagagagtctctttcatgtcatccatgaggcacattccctactgtgatgtgttatgcatacaattatttcaataaatattttctagctctttgattgaccaaagcttaattacctgtcaactctagcctcttgtatctggaatttctacagtctttggatagtatctttaggatgcaaaattaggaggagtatgtaccaggcaaactattacaaataatgccctcaaatagttacatttcactattcatgtcttgtaatttatcttctgctttggtattttagtacacttatgattcaatttgctgtatagattcctctgaatagggacaagagaattcgtcttgataagtggaagttcgaaggattccaaaatgatgttattcaaggtagaacaagaaattaatactgaaaaaattgaggagtaataatccccaaatatgtacatgcgtatctcgttttattgggtttcactttattgcactttgcagatatttcactttttgtaaattgaaagtttgtggcaaggctgcattgagcaagtccgtcgggcacaatttttccaacagcatgtgctcgctttacgtctctgtgtcacgttttggtaatttgctcaatatttcaaacattattattattattatatttgttatgatctgtgatcagtgacctttgatgttactattgtaattgttttgagatgtcatgaactgcactcatatgagatggcaaactttgtggggtgcagtggctcacacctgtaatcctaacactttgggaggccaaggcaggaggatcgtgttagcccagaagtttgagaccagtctgggaaacaaagtgagaccctgtctttaaaatatatatgtagaaaaattaactgggcatggtggcacatggctgtaaggagccctgccagctgcatgggaggctgacacaggaggatcacttgagcccaggaggtcaaggcggcagtaagccatgttcactccagtgccctccagccagaatgacagagcaagaccctgtgtggaaaaaaaaaaaaagacaaacattttttcaactttgattttagattcagggagtacatgtgtaggtttattaccttgatatattacatgatgccgaggtttggagtacaaatgatactgtcacccaggtactgagcatagtaaccgatagttagtttttcaacccttgtttccctccctccccactctagtagtcctccgtttctattgttgccatcattatgtccatgacaacgcactgtttagctccacatgagaacacgtggtatttggtattgtgtttctgcattaattcacttagaataatggcctccagctgcatccatgttgctgcaaaggacatgattttgttcttttttatggctgcatagtattccatggtgtatatgcaccgtattttctttctccagtctgccactgatgggcacctaggctgacttcatacctttgctattgtgaatagtgctgaaatgaggatgagaatacatgtggttttttagtaaagcaatttgttttatttgggctatatgcccagtaatgggatcactaggttgaacgatagttgtgttttaagtcctttgagaaatcttcaaactgtttcactgtggctgaactaatttgcattcccagcaacagtgtatcagagttccctcttctctacagcgtcagcagcatctgtcatttttttgactttttaataatagccagtatgaatggtgtgagacggtatctcgttgtggttttgatttgcatttctctgatgttgagtgatgtggagcattttttcatgtttgttggccacttgtatgtcttcttttgagtagtgtctgtttatgtcttttgcccattttttttgatggggttatttgtttttgacttgttgaattgtttaagttccctatagattctgaatattagacctttgtcagatgcatagtttgcaaatatattctcttattctgtagactgtctgtttactctgttgataaattctttcactgtgaagagctctttagtttaattaagttccacttgtcaatttttggttttgttataattgcttttgaggacttagttataaattctttcccaagtctgatgtccagagtggtgtttcctaggctttcttataggattcttataatttgagatctaatgtttaaacctttattccatcttgagttaatttttgtatatggtgtaaggagggggtccagttgcattcttctgcatatggctaaccagccatcccagcatcatgtcttaaatacagagtccttttcccattacttattttcataagatggcaaacttaatcaatcaatgttttgtgtgttctggctactccactgatcagccattccctcatctctcttcctctccttgggcctccctattccctgagacacaacaatattgaaattatgccagtcagtaaccctacaatgtcctctaagtgttcatgggaaaaaaaagagtcacatgtttgtcactttaaatcaaaagtcagaaatgattaagattggtgaggaaggcatgtcaaaagccaagacaggctgaaagccagacctcttgtgccagttggccaagttgtgaatgcaaaggaaacgttcttgaagaaaattaaaagtgctactctgttgaacacaggaataagaaagtggaacggccttatttttaatatggagaatgtcttagtggtctggatagaggatcaaaacagccacaccattatcttaagcaaaaggctaatctaaagcaaaggactaattctctgcaattctgtgaatgccgagagaggtgaggaagctgcagcagaaaagttggaagctagcagaagtatgttcatgagccttaatgaataagccctctctataacataaaagtgcaaggcagagcaacaagtgctgatggagaagctgcagcaaactatccagaagatcaaactaacatctaagttaataaaggtggcaatactaaacaacacattttcaatatagacgaaacagccttctattggaaaaggatgccatctaggactttcatagctagagagaagtcaatgcctggcttcaaaagttcaaaggacaggctgactgtcttgtgaggggctaatgcaactggtgactttcagttgaagccagtgctcgtttaccattccaaaaatcctagggcccttcaggttatgctagatctagtctgcctatgctctgtaaatcaaacaacaaagactagatgactgcacatctctttacagcatggtttgatgaacattttgagccctctgttgagacctacttctcaaaaaaatgtgtctttcaaaatattactgctctttgacaatgtccctggtcacccaagagccctgaggaatatgtccaaagagaatgattttattttcatacctgctaacacaacatccattctgcagtccttggatcaagaagtcacttcaactttcaagtcttattacttaaatcatacatttcataaaggtatagctgctatattgtggtgagtccactgatggatctggataaagtaaactgaaaacggaaagtcctcaccattccagatgccatgaagaaaattcatgattgaggggaggaggtcaaaatatcaacattatcaggagtttggaagtagttaattccaacactcatcaatgactttgagggtccaagacttcagtagaagaagtcactgcagatgtggtagaaatagcatgagaaccagaatgagaagtggagtcagaaggtgtgactgaatagctgtaatctcaaggtaaaacttcagcggatccagagttgctgcttatggatgagcaaagattgtggtttcatgagatgcactctactcttggtgatgatgctgtgaacattgttgaaatgacaacaaaggatttagaatattccataaacttagttgataaattagcatcagggtttgagaagattgactcaaattttgaaagaagttctactgagtaaaatgctatcaaacagcatcacatgctacaaagaaatcattggctataaaggagagccaatcgatgcagcaaacttcgttgttgtcttattttaagaaattgctacagccatcccgaccttcagcaaccgccaccctgatcaatcagcagccatcctcactgaggcaagagcctgtaccagcaaaaagattatgactccctgcaggctcagatgattgttaccattttttttaggagtaatgtattttcaaattaaggtatgtacattttttagatacaatgctattgcacacttgacagatgatagtagagtgtaaacataacatttaatgcactggggaaccaaaaatattcgtgtgcctcattttattgtgatatttactttattgcagcagtctggaaccaaacacacaatattccaaggcagtcctatatattgtttcatgtctctctttcttctaaaatgtgtgtaggagaaaaaattatatcacttatgttactgggccataatatcaaaagcctgcgaatctgatgcacatgataaaaactggtcttaaacctgtcttgattatcctttgttaatatgccaaatttatagaacaatagagtttcaagaaatgtgaacaatgtagaataactaaaagatctaacgttgaatagctaaaattatcaacgccctttatatcactttagaaatgcgtttgcaaatcattatcaacaaattgtagcataaaattctttttttttcttgactttgaaattgtatttcaagatccgcaatttacaccacattatttacttactggcttgtgaaagtgaaaggcattttcatttttggatgttaagggttttagtaaatgacaagtaaatcaatcctttaagttccgtgtggtataatagcttggaaaggaccatcttaatctttttttcaacacagggagataatttattttaaaaataacacactaatagtagattaatattattaccatttcaaagaagtcaccaaatttggtaggcttaagaggttttttttttttttttgagattactatgctctttttttattttatttattttatatttatttatttattttttagttttttaattttactttaagttctgggatacatgtgcagaacgtgcaggtttgttacctaggtatacatgtatcatggtggtttgctatactcatcaacccaacatccaggttttaagcccccaatgcattaggtatttgtcctaatgctctctgtccccttgcccctcaccccttgacaggccccggtgtgtgatgttcccctccctgtgtccatgtgttctcattgttcaattcccacttacgagtgagaacatgcagtgctaggcttaagagtttttttaactccccaaaatatcaacaaattgaaacattactacaaagaaatagagaaataaatttcactgactgtcttattgttttttaagtttgaatagctaataatgatttcttaaacagctatcatattttttatttttaaagctagccaaatgatcagtgatttttataatactgataaatactgcttagaaaaggaacatgtgttctagcaatttccacacatttctgattctaattacttgtttctttttgttttatttttatatttttaagttttgtgagtacctagcaggtgtatatatttatttggtacttgagatgttttgatacaggcatgcaatgtgtagtaagcacatcatgtaaaatggggtattcaacccctcaagcatttattctttatgttccaaacaatccaattatactcttttaattaatgtaaaatgtacaattaaatcattattggttatagtccccctgttgtgctatcaaatagtaggtcttactcattctttctaactaattttttgtacccagtaactatacctacaccacccccacctccccacgacccttcccatcctcaggtaaccatccttctactctctatgtccatgagttcaattgttttgaattttaaatcccacaaataagtgagaacatgcaatgtttgtctttctgtgtctgatttatttcacctagcatactgacctccatttccaacaatgttgttgcagatgacagaatctcattcttttttgtggctgagtagtattccattgtgcataggtaccacatgttctttgtccattcatctactgatggacacttaggttgcttccaaatcttggctattgtgaatagcgctgcaataaacatgggagtgcagatatctcttcaatatactgatttattttcttttgggtatatacccagcagcgggaatgctatattatatggtagctctatttttagttttttgaggaacctccaaacggttctccatagtggttgtgctaatttacatttccaccaacagtatacaagggttcctttttcttcacatacttgtcaacattggttattgcctgtcttttggatataagccattttaacgggagtgaggtaatatgtcattgtaattttgattttcatttctctggttatcaatgattcagtgatgttgagcaccttttcatatgcttgtttgccatttgtatgtattcttgatctgccacaagtctctaattacttgtttcttgtaccactgtttcccttcattgtagtcagtgatttggtcaatcaacactttttacgtatgggtatctgttaactgtatttctaggaatggaccaagaattgagaaatttatcccaaccagaaagaacaaaatctatggaggcacaggattactgaaagctttgctcctatagcctcagtttttttctgcaagttcgctgcttcccagttgtccttgtgataaaattcaaaacctcaaactgatttttaaaaagccaactatatactgcttctactatgtctacctaaacttatttgccattatttgtaaagaattccaggctctaaccagcccatttgaggctttattttacgttcatgcctttgttcatgtctgtctttcccttataatgctcttctcattctctagccaaatctgccaaagttcagctgtagtgccatacttgatatgaagtctttgctgagaattcccatatgtggtcatttccttcactgatttgtttcaatagttgttgccattattattattttttttatactgttgctggatactttcgcagatccaatctctaacctgttgttctaccctaggaggttgaccaatatggcagtagcattgggcttgcttgtctattggcttggtccttgtgttgggaggcatcagcagatcaatggatgagaggagagtgagtcgagggatggctaggttcctttactcacagccccagctcctgtcaagaggtcttgtccctgcagccacttctcagattctactaactataccctccccttagcctttcaggccttgaggaggaaagcctcctcatcccactttgaatgaactatttattgcaagaaccatgactgattcagaatataatctgtccttgaatgaaatagttaatttccccttttgtattctcgtttcatatccctgtccctttatccattcctatattatatcatactatcatatagctaccttatattatactatgacatgagtaccttgtaagtatatcatgctatattatagttcttaagtgtgtgggctttggggccaacttacctatgttagaagttctgccacttattaccatgtgatcctagacaaattgtttaacttctttttcattcattttctttactagtaaaataggggcaatattagtacccacctcacagagtaatatgataattacattgactgatagtttttatttaaaacttttattgttcttactatgaaatgggaaatgttctaaacaccttacaaatattaactctattaattctcataatgaatctgagaggtagagactcagtatctccatttcacagtgctggaaatgatacagacagcatttaagtaacatactgaaaatagtaaaccgaataggtggcagccagtatgcaaattgggaaagcctgactccagagttcattcttttaactagtatgctgtgatagactcttttggcatatggtatgcactcaataaacaactattgttgttgtcgttagcattacttcccattgtattattacacaaaaaataattgtttatgagtatttgtttgctagattataagttccttgaaaaaagaagacaagttttatttgtctatgtgtactagctgagtgcttggcaaatagttgcagtttagtaaatgtttctaaaacaaattattagttgtttcttatgtatttcccaagtctatcctagccttggaaacagctaacacttagctaaacctagaaatgtcatttgagatttcagcagccatcattgttgctgaagccacaggttctcctttttatctccaatttcttcctcagatgattcaccactttctttgtcgtttccctacttcatttttcctatagtgacttttgttctccaataaccattgatagtgatgacagtcccaccttggaaccacttctaactgtcctgttcagcttttcctgaggccagatttcccccaaaatacattttttagcttcataactgctccttccagaaatttgaaacgcattctcaggaattaagcaagaggcatttgattgacgtcatttaatttgtgtttaaatgtgttcttcccatcaacgattaaccagtgcttcagccaagatacataacttttattctccactaaccttagggttgaggtcacaatcaggtacgtaatctgtagagcccagtgaaaaatgaaaacgcagggcccttggttaaaaaaaaattaagaatttcaagatggcaacagtagagcatgaaaccaagtatgaatcccttctaatgcagatccttgtgtaactaactgcacaagttatacgttcaagaagctggtcctggttgaggtctttgtctacctagggcacttctcactcagagaggtggaataatcttaactttctgtcttccgtcatctgaaaacttgccccaaagttccttttgccatctcttgcagcaaacctagtggttgttatctgttaaggattcctggtggcttgctttagtttcctacagttcttgagctgcatgtgttgaatggaactccaccattaccatgtaacacatctgaatactcttattttcctccagttaaattctgcgctccttggaaataatggtcatgcaccctaccttagtgatttctaaatagaggtagtatgtaaaaatacatatttacttgaattgcatcttaagaggccagcccatgggaggcatgaagaaacctatgttactaattaatattcaataattgacagttacacattcaggtagtagtgtcatggaaccatcacgttacatggaactgaagagctgatgagaggtttagggtctaggaggacaaaagtgagtgtattagtcagggcctgaggttatatgtacccagacaggataaaatgggacaatattttattagtggaaatatctatgtgaaagaaaagaaggaggaagccaaggaaggtgcaagagatgttagatcaagatgcaattctgactctgcaaggaagagagagggagagaaggctaggcagaagcatcccagtgtgcggtctagtggaaggaaattttggcaaagctgttgggaagtcattgaggcagagccaggcaaagaagtcccatgtctcccaaggaaggctctctgccttagtattcccaccacacccaatcattgggtgaggagaagtctgtgagaagcttggctttggtgcagtgcaatcatggatttcaaaatgcagtaacaggagtcctcagtcagttaagacccaataatagaaggcctgcatattctcatggtggccacttgggtatgaggagcagtggtgtttaaaactgttttgtataatttaaataaagaaaagctgaggactacttaagcttgattccttcagaagacagtctttggcctttatatttcatgtgatatctttgccatatgctctgataactctccatgtttcccctaccataatacctcaggttgttgcaattgcttttttattgcctgtcatcactactcgtttgttttctctttgagaacaggaattattttctccttcactgctacagcccctgcacctagctcaatgagtgacacaacagaagcacttaaaaaattgctataactcaaatttgggggatattctacaaaatacctggcctctgttggtcaaaactgtaagtgttataaagttcaaagaaaggcaaataactatttcaacttaaaaaagactaaggagatacgacaactaaaagcaatgcgtgagtctggaccagaccaggaaataaaaatatagctataaagttcattaatggggtaattgtcatactctgaatatagagtatggataagattatggtactaaagccacgctaaatttcctgactttgaaactgagctgaggttatttaagagaatgtctttgctattaagaaataaaacctaaagtatttaagggtaaaggggcatgatatctgcaaattattctcaaatgattcagaaaaaaaatatatatatataaaacattacatatacagttatatatctatacacacagagagaatgataaaatgataaataattaaaaataatgtggcaaaatgttaacaaatggtgaatccgggcaagggttacctgggagttctttatcttgcaaatattctgcaagcttgaaattatataaaaataaaatgcatcttataaagtatttattcagtgaataaagaacaaaaaaggctaactgcagttggaagatatttatgaagttggttatgaagattcttaagaagttaccgatggaggtgctagtagaacattcaaaaaagaagtagggaaggttgaccaagtaggaaaatatcaatatccaagccagtataaaatggaaatgagaagtgaggaagtaagtggaagacaatgaggatggttttcgatttggccactctatttggagaggcagccgaatgcaagaatagaagccagaagaagatgctcagtgagatggttgaaagctagatagattacagcatcctcaccagtaaaaccctttcggtaactagaaaggctacaatttagtaccttcctgacttctatgcttattttcttcaatacataaaatggttccgtaaactcttttaccttctgaattctttatattaattttttgaagttgtaaataaaatagcatcagttctacattgttacatttcagcttaattcatattcatttactgaaaatgggaacatttgaaaaatcatcatgggcatttatgctatgtagattgttgatttttatagaaaaatataaaaatatgaccagtttgattttcaaagtcttttcttagacatgtaaatactaagcattcaactcaacatatagagtttttatttgagtattatttaggtggaattctattttaatgaatacaataaaaaattgtaattttgtctaaaagcctaaaatgccctagttataatatgtatgatttcactgtttaacttcctatttcatagggttgctatttataaccacttcactcaactctggggggacttagtgagattaaagacttctgattcactttgtatttgaagaattttttttcctccatctttgctcagctagtggaatccatgatgaattctcatctccaaggggtaagcagtttttagtaaagcccagtagctgacttatgactccttagaaatagcattgattccttccttctcctgtgttttgtttcctctagaatgatagaatccatgtagacacgatccattatcatgcttaggtactggtaagcatgtaatgattttagttttgttcgctttaagttatttgtgtcacaaatatctgggatcatatcagagaaataaataagcacaattagcattctacttgtttgttatgactaaagctaggttgaggaaacagaaaaggaccagaggtcatatgaggatgaagataatactaggaacagcatgtttgggagagtaacatctggtaggggtagcagattgggggcagagaacagaattttatagatggatattttggaggcaagtagtttgagtaatgattagatctaaggtgttttctcatctgtgggtggctcgaaggaatagaggtgaaggtcagtttatttgagaagttctggaattataaaactaagttgaagtcaaagaaagtatagtagcaaataaatagaatacccttaaaaggaaaccaaatgaaaaataatcgttactctcaccatatgcttgtgttcttattagcaagaaattcttttaaccactgtttttataatatcttaatgaaaaaatactgaagcgtatgccatattaaatccctctctttatttctagaaagggaatcaaaggagaaaattcccattctgctatactaaaagaccactaagtaaagagcctattagtgtatgataaatcccatagcaatatacattatcattttacagcttctttgttgaaatgaatgtttgtatgtgttgaccatagagtgggataaaaagttgaaattttgttttgaaatattttagaaatgcatagttgtactgcagttgtgaacctccttagatttttaaggaggctgcttcaaaggatctcattaataatcttctcaggtgcttacaaagcatgtgtctgtcagcagaattagagaatcacccaactagagaacaggtttcacaataccctgagacctattttgttcattagagaggaaaatggcttgttttgagtctaagttgacatgcttgctaatttcagcaataaaagctgttcattgtggtcaggtttaatttagagcctggtaaggttcagattaaagttgatcaacttacttttacaacatacttcttaaatgaactttgaaatcttaaaagaaggaaaaaagtatagcaaacagtgaataatgtatctaaaactgagaagcaaaaaaaatctggttatgtgagagtgaattaaaagaagaacaacccaataaagataatctttgttatataaaaatttccaagtatcgaaaagcacgatttttcatgtgagttacacactataccgaatatatttgtccactgccacatgcatagtccctagaatagtgcctagtgctgaaaaatatttattaaaatgaatggatgagtaaatgaatttatgtattttgccagccctgtgtatttaaagttctctgttaactttgaggtgaaaatttgacttcatctgaggtttctgggtaagtccgttttaaaaattctattgaacatattcaaacattttagggtaggcaattccaaagcaacctttcagcttcccatgtcacagatgaccagagtttcacattctaacactggaaaacatcttatttcataaaatctacctgctactatatggttcctactttaaaatttgttcagtactctccagctgacttatgccacttacttcaatagctgtctttggcaatttgttccatatttcaaacactctgttgtgtaaagaaaccataaaagttagaaacctgaaaattggattttttttctgagcaatcacagcttacaaatgtggaaaatttgttaaaagttagcccctccaatttttcaatacagagaggagaaagtgcctaaagtagatgtacaatgtttggaaaagttttttgcattattttactattaccaaaagcaattgagtttaaatcacaaagcctgtctccctacctcttcacagaagaaacactacagaatgatcaaaatttggcctttccaaaaccaaaattcgttagaaaatcagcaggagtcaaagtacagagtaaataactaagtttcatataagtttcagatacattactatctaccactttcatctcttcatcttcattggcctcatgtggtagaacatcatatttaaaattatacaaacttgctggcttgtttactagtgtggttattataagaaaaaaatgagaaaatatagataaaacatctgtcacatattgcttataaactaacagtaaatattacttgtattttccccaattaaaataaaatttactgagttttagaaccagagctagtcagatgcctttttttcataaatttcttcataaatacctctgagattgtggtccttaaatctagagagactaagatgacagagaaaatagacactgaagaaagggaagaatatcttaatgatttacattactacctataaattaaaaattgttaactttattatatttgtatttttatttaaaatagtgctatattaaagtcatttataatacaggggaataggaatactaacctgtaatctgatgctctccaaacttgcctaaatcataaaagttaattagataatttatttaaaatgcaagatttgcagccctttccactacatattcattagttctggagggaggcaaaaaggtttggtgattcttacggacaggcagcttaggagaaaagctgatttagctcgtctacttcaccttttcatttgacaggtgagaaatctcaggggtacaatgaagttaaataagtaatatctcttaaatcggttctgtgctttttctgtttttaaaataaatataccttaattttgacgtcacacagaatgatattataagtataaatagttatctatcttttaaatacattgtcgtaattcagaataacatttcttactcaaggcattcagacagtggtttaagtaatccgaggtactccggaatgtctccatttgagcctttaaatgaagaaaatctatagtcaagattttcatttgaaatatttttgatatctaagaatgaaacatatttcctgttaaattgttttctataaacccttatacagtaacatcttttttatttctaaaagtgttttggctggtctcacaattgtactttactttgtattatgtaaaaggaatacacaacgctgaagaaccctgatactaagggatatttgttcttacag

SEQ ID NO: 129 - DNA, 915 bp, Artificial Sequence
  Synthetic
agggcctatttcccatgattccttcatatttgcatatacgatacaaggctgttagagagataattggaattaatttgactgtaaacacaaagatattagtacaaaatacgtgacgtagaaagtaataatttcttgggtagtttgcagttttaaaattatgttttaaaatggactatcatatgcttaccgtaacttgaaagtatttcgatttcttggctttatatatcttgtggaaaggacgaaacaccgtcatttataatacaggggaatgttttagtactctggaaacagaatctactaaaacaaggcaaaatgccgtgtttatctcgtcaacttgttggcgagatttttttctagacccagctttcttgtacaaagttggcgtttaaacattcctattcccctgtattataaatgagttaatttgcgttctagccaccgagatacagtaacatcttttttatttctaaaagtgttttggctggtctcacaattgtactttactttgtattatgtaaaaggaatacacaacgctgaagaaccctgatactaagggatatttgttcttacaggcaacaatgcaggatttggaacagaggcgtccccagttggaagaactcattaccgctgcccaaaatttgaaaaacaagaccagcaatcaagaggctagaacaatcattacggatcgaagtaagttttttaacaagcatgggacacacaaagcaagatgcatgacaagtttcaataaaaacttaagttcatatatccccctcacatttataaaaataatgtgaaataattgtaaatgataacaattgtgctgagattttcagtccataatgttaccttttaataaatgaatgtaattccattgaatagaagaaatacattcctattcccctgtattataaatga

SEQ ID NO: 130 - DNA, 4461 bp, Artificial Sequence
  Synthetic
agggcctatttcccatgattccttcatatttgcatatacgatacaaggctgttagagagataattggaattaatttgactgtaaacacaaagatattagtacaaaatacgtgacgtagaaagtaataatttcttgggtagtttgcagttttaaaattatgttttaaaatggactatcatatgcttaccgtaacttgaaagtatttcgatttcttggctttatatatcttgtggaaaggacgaaacaccgtcatttataatacaggggaatgttttagtactctggaaacagaatctactaaaacaaggcaaaatgccgtgtttatctcgtcaacttgttggcgagatttttttctagacccagctttcttgtacaaagttggcgtttaaacattcctattcccctgtattataaatgagttaatttgcgttctagccaccgagatacagtaacatcttttttatttctaaaagtgttttggctggtctcacaattgtactttactttgtattatgtaaaaggaatacacaacgctgaagaaccctgatactaagggatatttgttcttacaggcaacaatgcaggatttggaacagaggcgtccccagttggaagaactcattaccgctgcccaaaatttgaaaaacaagaccagcaatcaagaggctagaacaatcattacggatcgaattgaaagaattcagaatcagtgggatgaagtacaagaacaccttcagaaccggaggcaacagttgaatgaaatgttaaaggattcaacacaatggctggaagctaaggaagaagctgagcaggtcttaggacaggccagagccaagcttgagtcatggaaggagggtccctatacagtagatgcaatccaaaagaaaatcacagaaaccaagcagttggccaaagacctccgccagtggcagacaaatgtagatgtggcaaatgacttggccctgaaacttctccgggattattctgcagatgataccagaaaagtccacatgataacagagaatatcaatgcctcttggagaagcattcataaaagggtgagtgagcgagaggctgctttggaagaaactcatagattactgcaacagttccccctggacctggaaaagtttcttgcctggcttacagaagctgaaacaactgccaatgtcctacaggatgctacccgtaaggaaaggctcctagaagactccaagggagtaaaagagctgatgaaacaatggcaagacctccaaggtgaaattgaagctcacacagatgtttatcacaacctggatgaaaacagccaaaaaatcctgagatccctggaaggttccgatgatgcagtcctgttacaaagacgtttggataacatgaacttcaagtggagtgaacttcggaaaaagtctctcaacattaggtcccatttggaagccagttctgaccagtggaagcgtctgcacctttctctgcaggaacttctggtgtggctacagctgaaagatgatgaattaagccggcaggcacctattggaggcgactttccagcagttcagaagcagaacgatgtacatagggccttcaagagggaattgaaaactaaagaacctgtaatcatgagtactcttgagactgtacgaatatttctgacagagcagcctttggaaggactagagaaactctaccaggagcccagagagctgcctcctgaggagagagcccagaatgtcactcggcttctacgaaagcaggctgaggaggtcaatactgagtgggaaaaattgaacctgcactccgctgactggcagagaaaaatagatgagacccttgaaagactccaggaacttcaagaggccacggatgagctggacctcaagctgcgccaagctgaggtgatcaagggatcctggcagcccgtgggcgatctcctcattgactctctccaagatcacctcgagaaagtcaaggcacttcgaggagaaattgcgcctctgaaagagaacgtgagccacgtcaatgaccttgctcgccagcttaccactttgggcattcagctctcaccgtataacctcagcactctggaagacctgaacaccagatggaagcttctgcaggtggccgtcgaggaccgagtcaggcagctgcatgaagcccacagggactttggtccagcatctcagcactttctttccacgtctgtccagggtccctgggagagagccatctcgccaaacaaagtgccctactatatcaaccacgagactcaaacaacttgctgggaccatcccaaaatgacagagctctaccagtctttagctgacctgaataatgtcagattctcagcttataggactgccatgaaactccgaagactgcagaaggccctttgcttggatctcttgagcctgtcagctgcatgtgatgccttggaccagcacaacctcaagcaaaatgaccagcccatggatatcctgcagattattaattgtttgaccactatttatgaccgcctggagcaagagcacaacaatttggtcaacgtccctctctgcgtggatatgtgtctgaactggctgctgaatgtttatgatacgggacgaacagggaggatccgtgtcctgtcttttaaaactggcatcatttccctgtgtaaagcacatttggaagacaagtacagataccttttcaagcaagtggcaagttcaacaggattttgtgaccagcgcaggctgggcctccttctgcatgattctatccaaattccaagacagttgggtgaagttgcatcctttgggggcagtaacattgagccaagtgtccggagctgcttccaatttgctaataataagccagagatcgaagcggccctcttcctagactggatgagactggaaccccagtccatggtgtggctgcccgtcctgcacagagtggctgctgcagaaactgccaagcatcaggccaaatgtaacatctgcaaagagtgtccaatcattggattcaggtacaggagtctaaagcactttaattatgacatctgccaaagctgctttttttctggtcgagttgcaaaaggccataaaatgcactatcccatggtggaatattgcactccgactacatcaggagaagatgttcgagactttgccaaggtactaaaaaacaaatttcgaaccaaaaggtattttgcgaagcatccccgaatgggctacctgccagtgcagactgtcttagagggggacaacatggaaactcccgttactctgatcaacttctggccagtagattctgcgcctgcctcgtcccctcagctttcacacgatgatactcattcacgcattgaacattatgctagcaggctagcagaaatggaaaacagcaatggatcttatctaaatgatagcatctctcctaatgagagcatagatgatgaacatttgttaatccagcattactgccaaagtttgaaccaggactcccccctgagccagcctcgtagtcctgcccagatcttgatttccttagagagtgaggaaagaggggagctagagagaatcctagcagatcttgaggaagaaaacaggaatctgcaagcagaatatgaccgtctaaagcagcagcacgaacataaaggcctgtccccactgccgtcccctcctgaaatgatgcccacctctccccagagtccccgggatgctgagctcattgctgaggccaagctactgcgtcaacacaaaggccgcctggaagccaggatgcaaatcctggaagaccacaataaacagctggagtcacagttacacaggctaaggcagctgctggagcaaccccaggcagaggccaaagtgaatggcacaacggtgtcctctccttctacctctctacagaggtccgacagcagtcagcctatgctgctccgagtggttggcagtcaaacttcggactccatgggtgaggaagatcttctcagtcctccccaggacacaagcacagggttagaggaggtgatggagcaactcaacaactccttccctagttcaagaggaagaaatacccctggaaagccaatgagagaggacacaatgtagtcgtttaaaccgctgatcagcctcgaaacttgtttattgcagcttataatggttacaaataaagcaatagcatcacaaatttcacaaataaagcatttttttcactgcattctagttgtggtttgtccaaactcatcaatgtatcttagtaagttttttaacaagcatgggacacacaaagcaagatgcatgacaagtttcaataaaaacttaagttcatatatccccctcacatttataaaaataatgtgaaataattgtaaatgataacaattgtgctgagattttcagtccataatgttaccttttaataaatgaatgtaattccattgaatagaagaaatacattcctattcccctgtattataaatga

SEQ ID NO: 131 - protein, 1368 aa, Artificial Sequence
  Synthetic
MDKKYSIGLAIGTNSVGWAVITDEYKVPSKKFKVLGNTDRHSIKKNLIGALLFDSGETAEATRLKRTARRRYTRRKNRICYLQEIFSNEMAKVDDSFFHRLEESFLVEEDKKHERHPIFGNIVDEVAYHEKYPTIYHLRKKLVDSTDKADLRLIYLALAHMIKFRGHFLIEGDLNPDNSDVDKLFIQLVQTYNQLFEENPINASGVDAKAILSARLSKSRRLENLIAQLPGEKKNGLFGNLIALSLGLTPNFKSNFDLAEDAKLQLSKDTYDDDLDNLLAQIGDQYADLFLAAKNLSDAILLSDILRVNTEITKAPLSASMIKRYDEHHQDLTLLKALVRQQLPEKYKEIFFDQSKNGYAGYIDGGASQEEFYKFIKPILEKMDGTEELLVKLNREDLLRKQRTFDNGSIPHQIHLGELHAILRRQEDFYPFLKDNREKIEKILTFRIPYYVGPLARGNSRFAWMTRKSEETITPWNFEEVVDKGASAQSFIERMTNFDKNLPNEKVLPKHSLLYEYFTVYNELTKVKYVTEGMRKPAFLSGEQKKAIVDLLFKTNRKVTVKQLKEDYFKKIECFDSVEISGVEDRFNASLGTYHDLLKIIKDKDFLDNEENEDILEDIVLTLTLFEDREMIEERLKTYAHLFDDKVMKQLKRRRYTGWGRLSRKLINGIRDKQSGKTILDFLKSDGFANRNFMQLIHDDSLTFKEDIQKAQVSGQGDSLHEHIANLAGSPAIKKGILQTVKVVDELVKVMGRHKPENIVIEMARENQTTQKGQKNSRERMKRIEEGIKELGSQILKEHPVENTQLQNEKLYLYYLQNGRDMYVDQELDINRLSDYDVDHIVPQSFLKDDSIDNKVLTRSDKNRGKSDNVPSEEVVKKMKNYWRQLLNAKLITQRKFDNLTKAERGGLSELDKAGFIKRQLVETRQITKHVAQILDSRMNTKYDENDKLIREVKVITLKSKLVSDFRKDFQFYKVREINNYHHAHDAYLNAVVGTALIKKYPKLESEFVYGDYKVYDVRKMIAKSEQEIGKATAKYFFYSNIMNFFKTEITLANGEIRKRPLIETNGETGEIVWDKGRDFATVRKVLSMPQVNIVKKTEVQTGGFSKESILPKRNSDKLIARKKDWDPKKYGGFDSPTVAYSVLVVAKVEKGKSKKLKSVKELLGITIMERSSFEKNPIDFLEAKGYKEVKKDLIIKLPKYSLFELENGRKRMLASAGELQKGNELALPSKYVNFLYLASHYEKLKGSPEDNEQKQLFVEQHKHYLDEIIEQISEFSKRVILADANLDKVLSAYNKHRDKPIREQAENIIHLFTLTNLGAPAAFKYFDTTIDRKRYTSTKEVLDATLIHQSITGLYETRIDLSQLGGD

SEQ ID NO: 132 - protein, 1368 aa, Artificial Sequence
  Synthetic
MDKKYSIGLAIGTNSVGWAVITDEYKVPSKKFKVLGNTDRHSIKKNLIGALLFDSGETAEATRLKRTARRRYTRRKNRICYLQEIFSNEMAKVDDSFFHRLEESFLVEEDKKHERHPIFGNIVDEVAYHEKYPTIYHLRKKLVDSTDKADLRLIYLALAHMIKFRGHFLIEGDLNPDNSDVDKLFIQLVQTYNQLFEENPINASGVDAKAILSARLSKSRRLENLIAQLPGEKKNGLFGNLIALSLGLTPNFKSNFDLAEDAKLQLSKDTYDDDLDNLLAQIGDQYADLFLAAKNLSDAILLSDILRVNTEITKAPLSASMIKRYDEHHQDLTLLKALVRQQLPEKYKEIFFDQSKNGYAGYIDGGASQEEFYKFIKPILEKMDGTEELLVKLNREDLLRKQRTFDNGSIPHQIHLGELHAILRRQEDFYPFLKDNREKIEKILTFRIPYYVGPLARGNSRFAWMTRKSEETITPWNFEEVVDKGASAQSFIERMTNFDKNLPNEKVLPKHSLLYEYFTVYNELTKVKYVTEGMRKPAFLSGEQKKAIVDLLFKTNRKVTVKQLKEDYFKKIECFDSVEISGVEDRFNASLGTYHDLLKIIKDKDFLDNEENEDILEDIVLTLTLFEDREMIEERLKTYAHLFDDKVMKQLKRRRYTGWGRLSRKLINGIRDKQSGKTILDFLKSDGFANRNFMQLIHDDSLTFKEDIQKAQVSGQGDSLHEHIANLAGSPAIKKGILQTVKVVDELVKVMGRHKPENIVIEMARENQTTQKGQKNSRERMKRIEEGIKELGSQILKEHPVENTQLQNEKLYLYYLQNGRDMYVDQELDINRLSDYDVDAIVPQSFLKDDSIDNKVLTRSDKNRGKSDNVPSEEVVKKMKNYWRQLLNAKLITQRKFDNLTKAERGGLSELDKAGFIKRQLVETRQITKHVAQILDSRMNTKYDENDKLIREVKVITLKSKLVSDFRKDFQFYKVREINNYHHAHDAYLNAVVGTALIKKYPKLESEFVYGDYKVYDVRKMIAKSEQEIGKATAKYFFYSNIMNFFKTEITLANGEIRKRPLIETNGETGEIVWDKGRDFATVRKVLSMPQVNIVKKTEVQTGGFSKESILPKRNSDKLIARKKDWDPKKYGGFDSPTVAYSVLVVAKVEKGKSKKLKSVKELLGITIMERSSFEKNPIDFLEAKGYKEVKKDLIIKLPKYSLFELENGRKRMLASAGELQKGNELALPSKYVNFLYLASHYEKLKGSPEDNEQKQLFVEQHKHYLDEIIEQISEFSKRVILADANLDKVLSAYNKHRDKPIREQAENIIHLFTLTNLGAPAAFKYFDTTIDRKRYTSTKEVLDATLIHQSITGLYETRIDLSQLGGD

SEQ ID NO: 133 - DNA, 3159 bp, Artificial Sequence
  Synthetic
atgaaaaggaactacattctggggctggccatcgggattacaagcgtggggtatgggattattgactatgaaacaagggacgtgatcgacgcaggcgtcagactgttcaaggaggccaacgtggaaaacaatgagggacggagaagcaagaggggagccaggcgcctgaaacgacggagaaggcacagaatccagagggtgaagaaactgctgttcgattacaacctgctgaccgaccattctgagctgagtggaattaatccttatgaagccagggtgaaaggcctgagtcagaagctgtcagaggaagagttttccgcagctctgctgcacctggctaagcgccgaggagtgcataacgtcaatgaggtggaagaggacaccggcaacgagctgtctacaaaggaacagatctcacgcaatagcaaagctctggaagagaagtatgtcgcagagctgcagctggaacggctgaagaaagatggcgaggtgagagggtcaattaataggttcaagacaagcgactacgtcaaagaagccaagcagctgctgaaagtgcagaaggcttaccaccagctggatcagagcttcatcgatacttatatcgacctgctggagactcggagaacctactatgagggaccaggagaagggagccccttcggatggaaagacatcaaggaatggtacgagatgctgatgggacattgcacctattttccagaagagctgagaagcgtcaagtacgcttataacgcagatctgtacaacgccctgaatgacctgaacaacctggtcatcaccagggatgaaaacgagaaactggaatactatgagaagttccagatcatcgaaaacgtgtttaagcagaagaaaaagcctacactgaaacagattgctaaggagatcctggtcaacgaagaggacatcaagggctaccgggtgacaagcactggaaaaccagagttcaccaatctgaaagtgtatcacgatattaaggacatcacagcacggaaagaaatcattgagaacgccgaactgctggatcagattgctaagatcctgactatctaccagagctccgaggacatccaggaagagctgactaacctgaacagcgagctgacccaggaagagatcgaacagattagtaatctgaaggggtacaccggaacacacaacctgtccctgaaagctatcaatctgattctggatgagctgtggcatacaaacgacaatcagattgcaatctttaaccggctgaagctggtcccaaaaaaggtggacctgagtcagcagaaagagatcccaaccacactggtggacgatttcattctgtcacccgtggtcaagcggagcttcatccagagcatcaaagtgatcaacgccatcatcaagaagtacggcctgcccaatgatatcattatcgagctggctagggagaagaacagcaaggacgcacagaagatgatcaatgagatgcagaaacgaaaccggcagaccaatgaacgcattgaagagattatccgaactaccgggaaagagaacgcaaagtacctgattgaaaaaatcaagctgcacgatatgcaggagggaaagtgtctgtattctctggaggccatccccctggaggacctgctgaacaatccattcaactacgaggtcgatcatattatccccagaagcgtgtccttcgacaattcctttaacaacaaggtgctggtcaagcaggaagagaactctaaaaagggcaataggactcctttccagtacctgtctagttcagattccaagatctcttacgaaacctttaaaaagcacattctgaatctggccaaaggaaagggccgcatcagcaagaccaaaaaggagtacctgctggaagagcgggacatcaacagattctccgtccagaaggattttattaaccggaatctggtggacacaagatacgctactcgcggcctgatgaatctgctgcgatcctatttccgggtgaacaatctggatgtgaaagtcaagtccatcaacggcgggttcacatcttttctgaggcgcaaatggaagtttaaaaaggagcgcaacaaagggtacaagcaccatgccgaagatgctctgattatcgcaaatgccgacttcatctttaaggagtggaaaaagctggacaaagccaagaaagtgatggagaaccagatgttcgaagagaagcaggccgaatctatgcccgaaatcgagacagaacaggagtacaaggagattttcatcactcctcaccagatcaagcatatcaaggatttcaaggactacaagtactctcaccgggtggataaaaagcccaacagagagctgatcaatgacaccctgtatagtacaagaaaagacgataaggggaataccctgattgtgaacaatctgaacggactgtacgacaaagataatgacaagctgaaaaagctgatcaacaaaagtcccgagaagctgctgatgtaccaccatgatcctcagacatatcagaaactgaagctgattatggagcagtacggcgacgagaagaacccactgtataagtactatgaagagactgggaactacctgaccaagtatagcaaaaaggataatggccccgtgatcaagaagatcaagtactatgggaacaagctgaatgcccatctggacatcacagacgattaccctaacagtcgcaacaaggtggtcaagctgtcactgaagccatacagattcgatgtctatctggacaacggcgtgtataaatttgtgactgtcaagaatctggatgtcatcaaaaaggagaactactatgaagtgaatagcaagtgctacgaagaggctaaaaagctgaaaaagattagcaaccaggcagagttcatcgcctccttttacaacaacgacctgattaagatcaatggcgaactgtatagggtcatcggggtgaacaatgatctgctgaaccgcattgaagtgaatatgattgacatcacttaccgagagtatctggaaaacatgaatgataagcgcccccctcgaattatcaaaacaattgcctctaagactcagagtatcaaaaagtactcaaccgacattctgggaaacctgtatgaggtgaagagcaaaaagcaccctcagattatcaaaaagggc

SEQ ID NO: 134 - DNA, 3159 bp, Artificial Sequence
  Synthetic
atgaaaaggaactacattctggggctggacatcgggattacaagcgtggggtatgggattattgactatgaaacaagggacgtgatcgacgcaggcgtcagactgttcaaggaggccaacgtggaaaacaatgagggacggagaagcaagaggggagccaggcgcctgaaacgacggagaaggcacagaatccagagggtgaagaaactgctgttcgattacaacctgctgaccgaccattctgagctgagtggaattaatccttatgaagccagggtgaaaggcctgagtcagaagctgtcagaggaagagttttccgcagctctgctgcacctggctaagcgccgaggagtgcataacgtcaatgaggtggaagaggacaccggcaacgagctgtctacaaaggaacagatctcacgcaatagcaaagctctggaagagaagtatgtcgcagagctgcagctggaacggctgaagaaagatggcgaggtgagagggtcaattaataggttcaagacaagcgactacgtcaaagaagccaagcagctgctgaaagtgcagaaggcttaccaccagctggatcagagcttcatcgatacttatatcgacctgctggagactcggagaacctactatgagggaccaggagaagggagccccttcggatggaaagacatcaaggaatggtacgagatgctgatgggacattgcacctattttccagaagagctgagaagcgtcaagtacgcttataacgcagatctgtacaacgccctgaatgacctgaacaacctggtcatcaccagggatgaaaacgagaaactggaatactatgagaagttccagatcatcgaaaacgtgtttaagcagaagaaaaagcctacactgaaacagattgctaaggagatcctggtcaacgaagaggacatcaagggctaccgggtgacaagcactggaaaaccagagttcaccaatctgaaagtgtatcacgatattaaggacatcacagcacggaaagaaatcattgagaacgccgaactgctggatcagattgctaagatcctgactatctaccagagctccgaggacatccaggaagagctgactaacctgaacagcgagctgacccaggaagagatcgaacagattagtaatctgaaggggtacaccggaacacacaacctgtccctgaaagctatcaatctgattctggatgagctgtggcatacaaacgacaatcagattgcaatctttaaccggctgaagctggtcccaaaaaaggtggacctgagtcagcagaaagagatcccaaccacactggtggacgatttcattctgtcacccgtggtcaagcggagcttcatccagagcatcaaagtgatcaacgccatcatcaagaagtacggcctgcccaatgatatcattatcgagctggctagggagaagaacagcaaggacgcacagaagatgatcaatgagatgcagaaacgaaaccggcagaccaatgaacgcattgaagagattatccgaactaccgggaaagagaacgcaaagtacctgattgaaaaaatcaagctgcacgatatgcaggagggaaagtgtctgtattctctggaggccatccccctggaggacctgctgaacaatccattcaactacgaggtcgatcatattatccccagaagcgtgtccttcgacaattcctttaacaacaaggtgctggtcaagcaggaagaggcctctaaaaagggcaataggactcctttccagtacctgtctagttcagattccaagatctcttacgaaacctttaaaaagcacattctgaatctggccaaaggaaagggccgcatcagcaagaccaaaaaggagtacctgctggaagagcgggacatcaacagattctccgtccagaaggattttattaaccggaatctggtggacacaagatacgctactcgcggcctgatgaatctgctgcgatcctatttccgggtgaacaatctggatgtgaaagtcaagtccatcaacggcgggttcacatcttttctgaggcgcaaatggaagtttaaaaaggagcgcaacaaagggtacaagcaccatgccgaagatgctctgattatcgcaaatgccgacttcatctttaaggagtggaaaaagctggacaaagccaagaaagtgatggagaaccagatgttcgaagagaagcaggccgaatctatgcccgaaatcgagacagaacaggagtacaaggagattttcatcactcctcaccagatcaagcatatcaaggatttcaaggactacaagtactctcaccgggtggataaaaagcccaacagagagctgatcaatgacaccctgtatagtacaagaaaagacgataaggggaataccctgattgtgaacaatctgaacggactgtacgacaaagataatgacaagctgaaaaagctgatcaacaaaagtcccgagaagctgctgatgtaccaccatgatcctcagacatatcagaaactgaagctgattatggagcagtacggcgacgagaagaacccactgtataagtactatgaagagactgggaactacctgaccaagtatagcaaaaaggataatggccccgtgatcaagaagatcaagtactatgggaacaagctgaatgcccatctggacatcacagacgattaccctaacagtcgcaacaaggtggtcaagctgtcactgaagccatacagattcgatgtctatctggacaacggcgtgtataaatttgtgactgtcaagaatctggatgtcatcaaaaaggagaactactatgaagtgaatagcaagtgctacgaagaggctaaaaagctgaaaaagattagcaaccaggcagagttcatcgcctccttttacaacaacgacctgattaagatcaatggcgaactgtatagggtcatcggggtgaacaatgatctgctgaaccgcattgaagtgaatatgattgacatcacttaccgagagtatctggaaaacatgaatgataagcgcccccctcgaattatcaaaacaattgcctctaagactcagagtatcaaaaagtactcaaccgacattctgggaaacctgtatgaggtgaagagcaaaaagcaccctcagattatcaaaaagggc

SEQ ID NO: 135 - protein, 5 aa, Artificial Sequence
  Synthetic
  REPEAT (1)..(5): Repeat 0 to 10
GGGGS

SEQ ID NO: 136 - protein, 5 aa, Artificial Sequence
  Synthetic
GGGGG

SEQ ID NO: 137 - protein, 5 aa, Artificial Sequence
  Synthetic
GGAGG

SEQ ID NO: 138 - protein, 7 aa, Artificial Sequence
  Synthetic
GGGGSSS

SEQ ID NO: 139 - protein, 7 aa, Artificial Sequence
  Synthetic
GGGGAAA

SEQ ID NO: 140 - protein, 2414 aa, Artificial Sequence
  Synthetic
MAENVVEPGPPSAKRPKLSSPALSASASDGTDFGSLFDLEHDLPDELINSTELGLTNGGDINQLQTSLGMVQDAASKHKQLSELLRSGSSPNLNMGVGGPGQVMASQAQQSSPGLGLINSMVKSPMTQAGLTSPNMGMGTSGPNQGPTQSTGMMNSPVNQPAMGMNTGMNAGMNPGMLAAGNGQGIMPNQVMNGSIGAGRGRQNMQYPNPGMGSAGNLLTEPLQQGSPQMGGQTGLRGPQPLKMGMMNNPNPYGSPYTQNPGQQIGASGLGLQIQTKTVLSNNLSPFAMDKKAVPGGGMPNMGQQPAPQVQQPGLVTPVAQGMGSGAHTADPEKRKLIQQQLVLLLHAHKCQRREQANGEVRQCNLPHCRTMKNVLNHMTHCQSGKSCQVAHCASSRQIISHWKNCTRHDCPVCLPLKNAGDKRNQQPILTGAPVGLGNPSSLGVGQQSAPNLSTVSQIDPSSIERAYAALGLPYQVNQMPTQPQVQAKNQQNQQPGQSPQGMRPMSNMSASPMGVNGGVGVQTPSLLSDSMLHSAINSQNPMMSENASVPSMGPMPTAAQPSTTGIRKQWHEDITQDLRNHLVHKLVQAIFPTPDPAALKDRRMENLVAYARKVEGDMYESANNRAEYYHLLAEKIYKIQKELEEKRRTRLQKQNMLPNAAGMVPVSMNPGPNMGQPQPGMTSNGPLPDPSMIRGSVPNQMMPRITPQSGLNQFGQMSMAQPPIVPRQTPPLQHHGQLAQPGALNPPMGYGPRMQQPSNQGQFLPQTQFPSQGMNVTNIPLAPSSGQAPVSQAQMSSSSCPVNSPIMPPGSQGSHIHCPQLPQPALHQNSPSPVPSRTPTPHHTPPSIGAQQPPATTIPAPVPTPPAMPPGPQSQALHPPPRQTPTPPTTQLPQQVQPSLPAAPSADQPQQQPRSQQSTAASVPTPTAPLLPPQPATPLSQPAVSIEGQVSNPPSTSSTEVNSQAIAEKQPSQEVKMEAKMEVDQPEPADTQPEDISESKVEDCKMESTETEERSTELKTEIKEEEDQPSTSATQSSPAPGQSKKKIFKPEELRQALMPTLEALYRQDPESLPFRQPVDPQLLGIPDYFDIVKSPMDLSTIKRKLDTGQYQEPWQYVDDIWLMFNNAWLYNRKTSRVYKYCSKLSEVFEQEIDPVMQSLGYCCGRKLEFSPQTLCCYGKQLCTIPRDATYYSYQNRYHFCEKCFNEIQGESVSLGDDPSQPQTTINKEQFSKRKNDTLDPELFVECTECGRKMHQICVLHHEIIWPAGFVCDGCLKKSARTRKENKFSAKRLPSTRLGTFLENRVNDFLRRQNHPESGEVTVRVVHASDKTVEVKPGMKARFVDSGEMAESFPYRTKALFAFEEIDGVDLCFFGMHVQEYGSDCPPPNQRRVYISYLDSVHFFRPKCLRTAVYHEILIGYLEYVKKLGYTTGHIWACPPSEGDDYIFHCHPPDQKIPKPKRLQEWYKKMLDKAVSERIVHDYKDIFKQATEDRLTSAKELPYFEGDFWPNVLEESIKELEQEEEERKREENTSNESTDVTKGDSKNAKKKNNKKTSKNKSSLSRGNKKKPGMPNVSNDLSQKLYATMEKHKEVFFVIRLIAGPAANSLPPIVDPDPLIPCDLMDGRDAFLTLARDKHLEFSSLRRAQWSTMCMLVELHTQSQDRFVYTCNECKHHVETRWHCTVCEDYDLCITCYNTKNHDHKMEKLGLGLDDESNNQQAAATQSPGDSRRLSIQRCIQSLVHACQCRNANCSLPSCQKMKRVVQHTKGCKRKTNGGCPICKQLIALCCYHAKHCQENKCPVPFCLNIKQKLRQQQLQHRLQQAQMLRRRMASMQRTGVVGQQQGLPSPTPATPTTPTGQQPTTPQTPQPTSQPQPTPPNSMPPYLPRTQAAGPVSQGKAAGQVTPPTPPQTAQPPLPGPPPAAVEMAMQIQRAAETQRQMAHVQIFQRPIQHQMPPMTPMAPMGMNPPPMTRGPSGHLEPGMGPTGMQQQPPWSQGGLPQPQQLQSGMPRPAMMSVAQHGQPLNMAPQPGLGQVGISPLKPGTVSQQALQNLLRTLRSPSSPLQQQQVLSILHANPQLLAAFIKQRAAKYANSNPQPIPGQPGMPQGQPGLQPPTMPGQQGVHSNPAMQNMNPMQAGVQRAGLPQQQPQQQLQPPMGGMSPQAQQMNMNHNTMPSQFRDILRRQQMMQQQQQQGAGPGIGPGMANHNQFQQPQGVGYPPQQQQRMQHHMQQMQQGNMGQIGQLPQALGAEAGASLQAYQQRLLQQQMGSPVQPNPMSPQQHMLPNQAQSPHLQGQQIPNSLSNQVRSPQPVPSPRPQSQPPHSSPSPRMQPQPSPHHVSPQTSSPHPGLVAAQANPMEQGHFASPDQNSMLSQLASNPGMANLHGASATDLGLSTDNSDLNSNLSQSTLDIH

SEQ ID NO: 141 - protein, 617 aa, Artificial Sequence
  Synthetic
IFKPEELRQALMPTLEALYRQDPESLPFRQPVDPQLLGIPDYFDIVKSPMDLSTIKRKLDTGQYQEPWQYVDDIWLMFNNAWLYNRKTSRVYKYCSKLSEVFEQEIDPVMQSLGYCCGRKLEFSPQTLCCYGKQLCTIPRDATYYSYQNRYHFCEKCFNEIQGESVSLGDDPSQPQTTINKEQFSKRKNDTLDPELFVECTECGRKMHQICVLHHEIIWPAGFVCDGCLKKSARTRKENKFSAKRLPSTRLGTFLENRVNDFLRRQNHPESGEVTVRVVHASDKTVEVKPGMKARFVDSGEMAESFPYRTKALFAFEEIDGVDLCFFGMHVQEYGSDCPPPNQRRVYISYLDSVHFFRPKCLRTAVYHEILIGYLEYVKKLGYTTGHIWACPPSEGDDYIFHCHPPDQKIPKPKRLQEWYKKMLDKAVSERIVHDYKDIFKQATEDRLTSAKELPYFEGDFWPNVLEESIKELEQEEEERKREENTSNESTDVTKGDSKNAKKKNNKKTSKNKSSLSRGNKKKPGMPNVSNDLSQKLYATMEKHKEVFFVIRLIAGPAANSLPPIVDPDPLIPCDLMDGRDAFLTLARDKHLEFSSLRRAQWSTMCMLVELHTQSQD

SEQ ID NO: 142 - protein, 1497 aa, Artificial Sequence
  Synthetic
RADALDDFDLDMLGSDALDDFDLDMLGSDALDDFDLDMLGSDALDDFDLDMVNPKKKRKVGRGMDKKYSIGLAIGTNSVGWAVITDEYKVPSKKFKVLGNTDRHSIKKNLIGALLFDSGETAEATRLKRTARRRYTRRKNRICYLQEIFSNEMAKVDDSFFHRLEESFLVEEDKKHERHPIFGNIVDEVAYHEKYPTIYHLRKKLVDSTDKADLRLIYLALAHMIKFRGHFLIEGDLNPDNSDVDKLFIQLVQTYNQLFEENPINASGVDAKAILSARLSKSRRLENLIAQLPGEKKNGLFGNLIALSLGLTPNFKSNFDLAEDAKLQLSKDTYDDDLDNLLAQIGDQYADLFLAAKNLSDAILLSDILRVNTEITKAPLSASMIKRYDEHHQDLTLLKALVRQQLPEKYKEIFFDQSKNGYAGYIDGGASQEEFYKFIKPILEKMDGTEELLVKLNREDLLRKQRTFDNGSIPHQIHLGELHAILRRQEDFYPFLKDNREKIEKILTFRIPYYVGPLARGNSRFAWMTRKSEETITPWNFEEVVDKGASAQSFIERMTNFDKNLPNEKVLPKHSLLYEYFTVYNELTKVKYVTEGMRKPAFLSGEQKKAIVDLLFKTNRKVTVKQLKEDYFKKIECFDSVEISGVEDRFNASLGTYHDLLKIIKDKDFLDNEENEDILEDIVLTLTLFEDREMIEERLKTYAHLFDDKVMKQLKRRRYTGWGRLSRKLINGIRDKQSGKTILDFLKSDGFANRNFMQLIHDDSLTFKEDIQKAQVSGQGDSLHEHIANLAGSPAIKKGILQTVKVVDELVKVMGRHKPENIVIEMARENQTTQKGQKNSRERMKRIEEGIKELGSQILKEHPVENTQLQNEKLYLYYLQNGRDMYVDQELDINRLSDYDVDAIVPQSFLKDDSIDNKVLTRSDKNRGKSDNVPSEEVVKKMKNYWRQLLNAKLITQRKFDNLTKAERGGLSELDKAGFIKRQLVETRQITKHVAQILDSRMNTKYDENDKLIREVKVITLKSKLVSDFRKDFQFYKVREINNYHHAHDAYLNAVVGTALIKKYPKLESEFVYGDYKVYDVRKMIAKSEQEIGKATAKYFFYSNIMNFFKTEITLANGEIRKRPLIETNGETGEIVWDKGRDFATVRKVLSMPQVNIVKKTEVQTGGFSKESILPKRNSDKLIARKKDWDPKKYGGFDSPTVAYSVLVVAKVEKGKSKKLKSVKELLGITIMERSSFEKNPIDFLEAKGYKEVKKDLIIKLPKYSLFELENGRKRMLASAGELQKGNELALPSKYVNFLYLASHYEKLKGSPEDNEQKQLFVEQHKHYLDEIIEQISEFSKRVILADANLDKVLSAYNKHRDKPIREQAENIIHLFTLTNLGAPAAFKYFDTTIDRKRYTSTKEVLDATLIHQSITGLYETRIDLSQLGGDSRADPKKKRKVASRADALDDFDLDMLGSDALDDFDLDMLGSDALDDFDLDMLGSDALDDFDLDMLI

SEQ ID NO: 143 - DNA, 4491 bp, Artificial Sequence
  Synthetic
cgggctgacgcattggacgattttgatctggatatgctgggaagtgacgccctcgatgattttgaccttgacatgcttggttcggatgcccttgatgactttgacctcgacatgctcggcagtgacgcccttgatgatttcgacctggacatggttaaccccaagaagaagaggaaggtgggccgcggaatggacaagaagtactccattgggctcgccatcggcacaaacagcgtcggctgggccgtcattacggacgagtacaaggtgccgagcaaaaaattcaaagttctgggcaataccgatcgccacagcataaagaagaacctcattggcgccctcctgttcgactccggggaaaccgccgaagccacgcggctcaaaagaacagcacggcgcagatatacccgcagaaagaatcggatctgctacctgcaggagatctttagtaatgagatggctaaggtggatgactctttcttccataggctggaggagtcctttttggtggaggaggataaaaagcacgagcgccacccaatctttggcaatatcgtggacgaggtggcgtaccatgaaaagtacccaaccatatatcatctgaggaagaagcttgtagacagtactgataaggctgacttgcggttgatctatctcgcgctggcgcatatgatcaaatttcggggacacttcctcatcgagggggacctgaacccagacaacagcgatgtcgacaaactctttatccaactggttcagacttacaatcagcttttcgaagagaacccgatcaacgcatccggagttgacgccaaagcaatcctgagcgctaggctgtccaaatcccggcggctcgaaaacctcatcgcacagctccctggggagaagaagaacggcctgtttggtaatcttatcgccctgtcactcgggctgacccccaactttaaatctaacttcgacctggccgaagatgccaagcttcaactgagcaaagacacctacgatgatgatctcgacaatctgctggcccagatcggcgaccagtacgcagacctttttttggcggcaaagaacctgtcagacgccattctgctgagtgatattctgcgagtgaacacggagatcaccaaagctccgctgagcgctagtatgatcaagcgctatgatgagcaccaccaagacttgactttgctgaaggcccttgtcagacagcaactgcctgagaagtacaaggaaattttcttcgatcagtctaaaaatggctacgccggatacattgacggcggagcaagccaggaggaattttacaaatttattaagcccatcttggaaaaaatggacggcaccgaggagctgctggtaaagcttaacagagaagatctgttgcgcaaacagcgcactttcgacaatggaagcatcccccaccagattcacctgggcgaactgcacgctatcctcaggcggcaagaggatttctacccctttttgaaagataacagggaaaagattgagaaaatcctcacatttcggataccctactatgtaggccccctcgcccggggaaattccagattcgcgtggatgactcgcaaatcagaagagaccatcactccctggaacttcgaggaagtcgtggataagggggcctctgcccagtccttcatcgaaaggatgactaactttgataaaaatctgcctaacgaaaaggtgcttcctaaacactctctgctgtacgagtacttcacagtttataacgagctcaccaaggtcaaatacgtcacagaagggatgagaaagccagcattcctgtctggagagcagaagaaagctatcgtggacctcctcttcaagacgaaccggaaagttaccgtgaaacagctcaaagaagactatttcaaaaagattgaatgtttcgactctgttgaaatcagcggagtggaggatcgcttcaacgcatccctgggaacgtatcacgatctcctgaaaatcattaaagacaaggacttcctggacaatgaggagaacgaggacattcttgaggacattgtcctcacccttacgttgtttgaagatagggagatgattgaagaacgcttgaaaacttacgctcatctcttcgacgacaaagtcatgaaacagctcaagaggcgccgatatacaggatgggggcggctgtcaagaaaactgatcaatgggatccgagacaagcagagtggaaagacaatcctggattttcttaagtccgatggatttgccaaccggaacttcatgcagttgatccatgatgactctctcacctttaaggaggacatccagaaagcacaagtttctggccagggggacagtcttcacgagcacatcgctaatcttgcaggtagcccagctatcaaaaagggaatactgcagaccgttaaggtcgtggatgaactcgtcaaagtaatgggaaggcataagcccgagaatatcgttatcgagatggcccgagagaaccaaactacccagaagggacagaagaacagtagggaaaggatgaagaggattgaagagggtataaaagaactggggtcccaaatccttaaggaacacccagttgaaaacacccagcttcagaatgagaagctctacctgtactacctgcagaacggcagggacatgtacgtggatcaggaactggacatcaatcggctctccgactacgacgtggatgccatcgtgccccagtcttttctcaaagatgattctattgataataaagtgttgacaagatccgataaaaatagagggaagagtgataacgtcccctcagaagaagttgtcaagaaaatgaaaaattattggcggcagctgctgaacgccaaactgatcacacaacggaagttcgataatctgactaaggctgaacgaggtggcctgtctgagttggataaagccggcttcatcaaaaggcagcttgttgagacacgccagatcaccaagcacgtggcccaaattctcgattcacgcatgaacaccaagtacgatgaaaatgacaaactgattcgagaggtgaaagttattactctgaagtctaagctggtctcagatttcagaaaggactttcagttttataaggtgagagagatcaacaattaccaccatgcgcatgatgcctacctgaatgcagtggtaggcactgcacttatcaaaaaatatcccaagcttgaatctgaatttgtttacggagactataaagtgtacgatgttaggaaaatgatcgcaaagtctgagcaggaaataggcaaggccaccgctaagtacttcttttacagcaatattatgaattttttcaagaccgagattacactggccaatggagagattcggaagcgaccacttatcgaaacaaacggagaaacaggagaaatcgtgtgggacaagggtagggatttcgcgacagtccggaaggtcctgtccatgccgcaggtgaacatcgttaaaaagaccgaagtacagaccggaggcttctccaaggaaagtatcctcccgaaaaggaacagcgacaagctgatcgcacgcaaaaaagattgggaccccaagaaatacggcggattcgattctcctacagtcgcttacagtgtactggttgtggccaaagtggagaaagggaagtctaaaaaactcaaaagcgtcaaggaactgctgggcatcacaatcatggagcgatcaagcttcgaaaaaaaccccatcgactttctcgaggcgaaaggatataaagaggtcaaaaaagacctcatcattaagcttcccaagtactctctctttgagcttgaaaacggccggaaacgaatgctcgctagtgcgggcgagctgcagaaaggtaacgagctggcactgccctctaaatacgttaatttcttgtatctggccagccactatgaaaagctcaaagggtctcccgaagataatgagcagaagcagctgttcgtggaacaacacaaacactaccttgatgagatcatcgagcaaataagcgaattctccaaaagagtgatcctcgccgacgctaacctcgataaggtgctttctgcttacaataagcacagggataagcccatcagggagcaggcagaaaacattatccacttgtttactctgaccaacttgggcgcgcctgcagccttcaagtacttcgacaccaccatagacagaaagcggtacacctctacaaaggaggtcctggacgccacactgattcatcagtcaattacggggctctatgaaacaagaatcgacctctctcagctcggtggagacagcagggctgaccccaagaagaagaggaaggtggctagccgcgccgacgcgctggacgatttcgatctcgacatgctgggttctgatgccctcgatgactttgacctggatatgttgggaagcgacgcattggatgactttgatctggacatgctcggctccgatgctctggacgatttcgatctcgatatgttaatc

SEQ ID NO: 144 - protein, 378 aa, Artificial Sequence
  Synthetic
DALDDFDLDMLGSDALDDFDLDMLGSDALDDFDLDMLGSDALDDFDLDMLGSLPSASVEFEGSGGPSGQISNQALALAPSSAPVLAQTMVPSSAMVPLAQPPAPAPVLTPGPPQSLSAPVPKSTQAGEGTLSEALLHLQFDADEDLGALLGNSTDPGVFTDLASVDNSEFQQLLNQGVSMSHSTAEPMLMEYPEAITRLVTGSQRPPDPAPTPLGTSGLPNGLSGDEDFSSIADMDFSALLSQISSSGQGGGGSGFSVDTSALLDLFSPSVTVPDMSLPDLDSSLASIQELLSPQEPPRPPEAENSSPDSGKQLVHYTAQPLFLLDPGSVDTGSNDLPVLFELGEGSYFSEGDGFAEDPTISLLTGSEPPKAKDPTVS

SEQ ID NO: 145 - DNA, 1134 bp, Artificial Sequence
  Synthetic
gatgctttagacgattttgacttagatatgcttggttcagacgcgttagacgacttcgacctagacatgttaggctcagatgcattggacgacttcgatttagatatgttgggctccgatgccctagatgactttgatctagatatgctagggtcactacccagcgccagcgtcgagttcgaaggcagcggcgggccttcagggcagatcagcaaccaggccctggctctggcccctagctccgctccagtgctggcccagactatggtgccctctagtgctatggtgcctctggcccagccacctgctccagcccctgtgctgaccccaggaccaccccagtcactgagcgccccagtgcccaagtctacacaggccggcgaggggactctgagtgaagctctgctgcacctgcagttcgacgctgatgaggacctgggagctctgctggggaacagcaccgatcccggagtgttcacagatctggcctccgtggacaactctgagtttcagcagctgctgaatcagggcgtgtccatgtctcatagtacagccgaaccaatgctgatggagtaccccgaagccattacccggctggtgaccggcagccagcggccccccgaccccgctccaactcccctgggaaccagcggcctgcctaatgggctgtccggagatgaagacttctcaagcatcgctgatatggactttagtgccctgctgtcacagatttcctctagtgggcagggaggaggtggaagcggcttcagcgtggacaccagtgccctgctggacctgttcagcccctcggtgaccgtgcccgacatgagcctgcctgaccttgacagcagcctggccagtatccaagagctcctgtctccccaggagccccccaggcctcccgaggcagagaacagcagcccggattcagggaagcagctggtgcactacacagcgcagccgctgttcctgctggaccccggctccgtggacaccgggagcaacgacctgccggtgctgtttgagctgggagagggctcctacttctccgaaggggacggcttcgccgaggaccccaccatctccctgctgacaggctcggagcctcccaaagccaaggaccccactgtctcc

SEQ ID NO: 146 - protein, 522 aa, Artificial Sequence
  Synthetic
DALDDFDLDMLGSDALDDFDLDMLGSDALDDFDLDMLGSDALDDFDLDMLGSPKKKRKVGSQYLPDTDDRHRIEEKRKRTYETFKSIMKKSPFSGPTDPRPPPRRIAVPSRSSASVPKPAPQPYPFTSSLSTINYDEFPTMVFPSGQISQASALAPAPPQVLPQAPAPAPAPAMVSALAQAPAPVPVLAPGPPQAVAPPAPKPTQAGEGTLSEALLQLQFDDEDLGALLGNSTDPAVFTDLASVDNSEFQQLLNQGIPVAPHTTEPMLMEYPEAITRLVTGAQRPPDPAPAPLGAPGLPNGLLSGDEDFSSIADMDFSALLSQISSGSGSGSRDSREGMFLPKPEAGSAISDVFEGREVCQPKRIRPFHPPGSPWANRPLPASLAPTPTGPVHEPVGSLTPAPVPQPLDPAPAVTPEASHLLEDPDEETSQAVKALREMADTVIPQKEEAAICGQMDLSHPPPRGHLDELTTTLESMTEDLNLDSPLTPELNEILDTFLNDECLLHAMHISTGLSIFDTSLF

SEQ ID NO: 147 - DNA, 1566 bp, Artificial Sequence
  Synthetic
gatgctttagacgattttgacttagatatgcttggttcagacgcgttagacgacttcgacctagacatgttaggctcagatgcattggacgacttcgatttagatatgttgggctccgatgccctagatgactttgatctagatatgctaggtagtcccaaaaagaagaggaaagtgggatcccagtatctgcccgacacagatgatagacaccgaatcgaagagaaacgcaagcgaacgtatgaaaccttcaaatcgatcatgaagaaatcgcccttctcgggtccgaccgatcccaggcccccaccgagaaggattgcggtcccgtcccgctcgtcggccagcgtgccgaagcctgcgccgcagccctaccccttcacgtcgagcctgagcacaatcaattatgacgagttcccgacgatggtgttcccctcgggacaaatctcacaagcctcggcgctcgcaccagcgcctccccaagtccttccgcaagcgcctgccccagcgcctgcaccggcaatggtgtccgccctcgcacaggcccctgcgcccgtccccgtgctcgcgcctggaccgccccaggcggtcgctccaccggctccgaagccgacgcaggccggagagggaacactctccgaagcacttcttcaactccagtttgatgacgaggatcttggagcactccttggaaactcgacagaccctgcggtgtttaccgacctcgcgtcagtagataactccgaatttcagcagcttttgaaccagggtatcccggtcgcgccacatacaacggagcccatgttgatggaataccccgaagcaatcacgagacttgtgacgggagcgcagcggcctcccgatcccgcacccgcacctttgggggcacctggcctccctaacggacttttgagcggcgacgaggatttctcctccatcgccgatatggatttctcagccttgctgtcacagatttccagcggctctggcagcggcagccgggattccagggaagggatgtttttgccgaagcctgaggccggctccgctattagtgacgtgtttgagggccgcgaggtgtgccagccaaaacgaatccggccatttcatcctccaggaagtccatgggccaaccgcccactccccgccagcctcgcaccaacaccaaccggtccagtacatgagccagtcgggtcactgaccccggcaccagtccctcagccactggatccagcgcccgcagtgactcccgaggccagtcacctgttggaggatcccgatgaagagacgagccaggctgtcaaagcccttcgggagatggccgatactgtgattccccagaaggaagaggctgcaatctgtggccaaatggacctttcccatccgcccccaaggggccatctggatgagctgacaaccacacttgagtccatgaccgaggatctgaacctggactcacccctgaccccggaattgaacgagattctggataccttcctgaacgacgagtgcctcttgcatgccatgcatatcagcacaggactgtccatcttcgacacatctctgttt

SEQ ID NO: 148 - DNA, 4560 bp, Artificial Sequence
  Synthetic
atggactacaaagaccatgacggtgattataaagatcatgacatcgattacaaggatgacgatgacaagatggcccccaagaagaagaggaaggtgggccgcggaatggacaagaagtactccattgggctcgccatcggcacaaacagcgtcggctgggccgtcattacggacgagtacaaggtgccgagcaaaaaattcaaagttctgggcaataccgatcgccacagcataaagaagaacctcattggcgccctcctgttcgactccggggaaaccgccgaagccacgcggctcaaaagaacagcacggcgcagatatacccgcagaaagaatcggatctgctacctgcaggagatctttagtaatgagatggctaaggtggatgactctttcttccataggctggaggagtcctttttggtggaggaggataaaaagcacgagcgccacccaatctttggcaatatcgtggacgaggtggcgtaccatgaaaagtacccaaccatatatcatctgaggaagaagcttgtagacagtactgataaggctgacttgcggttgatctatctcgcgctggcgcatatgatcaaatttcggggacacttcctcatcgagggggacctgaacccagacaacagcgatgtcgacaaactctttatccaactggttcagacttacaatcagcttttcgaagagaacccgatcaacgcatccggagttgacgccaaagcaatcctgagcgctaggctgtccaaatcccggcggctcgaaaacctcatcgcacagctccctggggagaagaagaacggcctgtttggtaatcttatcgccctgtcactcgggctgacccccaactttaaatctaacttcgacctggccgaagatgccaagcttcaactgagcaaagacacctacgatgatgatctcgacaatctgctggcccagatcggcgaccagtacgcagacctttttttggcggcaaagaacctgtcagacgccattctgctgagtgatattctgcgagtgaacacggagatcaccaaagctccgctgagcgctagtatgatcaagcgctatgatgagcaccaccaagacttgactttgctgaaggcccttgtcagacagcaactgcctgagaagtacaaggaaattttcttcgatcagtctaaaaatggctacgccggatacattgacggcggagcaagccaggaggaattttacaaatttattaagcccatcttggaaaaaatggacggcaccgaggagctgctggtaaagcttaacagagaagatctgttgcgcaaacagcgcactttcgacaatggaagcatcccccaccagattcacctgggcgaactgcacgctatcctcaggcggcaagaggatttctacccctttttgaaagataacagggaaaagattgagaaaatcctcacatttcggataccctactatgtaggccccctcgcccggggaaattccagattcgcgtggatgactcgcaaatcagaagagaccatcactccctggaacttcgaggaagtcgtggataagggggcctctgcccagtccttcatcgaaaggatgactaactttgataaaaatctgcctaacgaaaaggtgcttcctaaacactctctgctgtacgagtacttcacagtttataacgagctcaccaaggtcaaatacgtcacagaagggatgagaaagccagcattcctgtctggagagcagaagaaagctatcgtggacctcctcttcaagacgaaccggaaagttaccgtgaaacagctcaaagaagactatttcaaaaagattgaatgtttcgactctgttgaaatcagcggagtggaggatcgcttcaacgcatccctgggaacgtatcacgatctcctgaaaatcattaaagacaaggacttcctggacaatgaggagaacgaggacattcttgaggacattgtcctcacccttacgttgtttgaagatagggagatgattgaagaacgcttgaaaacttacgctcatctcttcgacgacaaagtcatgaaacagctcaagaggcgccgatatacaggatgggggcggctgtcaagaaaactgatcaatgggatccgagacaagcagagtggaaagacaatcctggattttcttaagtccgatggatttgccaaccggaacttcatgcagttgatccatgatgactctctcacctttaaggaggacatccagaaagcacaagtttctggccagggggacagtcttcacgagcacatcgctaatcttgcaggtagcccagctatcaaaaagggaatactgcagaccgttaaggtcgtggatgaactcgtcaaagtaatgggaaggcataagcccgagaatatcgttatcgagatggcccgagagaaccaaactacccagaagggacagaagaacagtagggaaaggatgaagaggattgaagagggtataaaagaactggggtcccaaatccttaaggaacacccagttgaaaacacccagcttcagaatgagaagctctacctgtactacctgcagaacggcagggacatgtacgtggatcaggaactggacatcaatcggctctccgactacgacgtggatgccatcgtgccccagtcttttctcaaagatgattctattgataataaagtgttgacaagatccgataaaaatagagggaagagtgataacgtcccctcagaagaagttgtcaagaaaatgaaaaattattggcggcagctgctgaacgccaaactgatcacacaacggaagttcgataatctgactaaggctgaacgaggtggcctgtctgagttggataaagccggcttcatcaaaaggcagcttgttgagacacgccagatcaccaagcacgtggcccaaattctcgattcacgcatgaacaccaagtacgatgaaaatgacaaactgattcgagaggtgaaagttattactctgaagtctaagctggtctcagatttcagaaaggactttcagttttataaggtgagagagatcaacaattaccaccatgcgcatgatgcctacctgaatgcagtggtaggcactgcacttatcaaaaaatatcccaagcttgaatctgaatttgtttacggagactataaagtgtacgatgttaggaaaatgatcgcaaagtctgagcaggaaataggcaaggccaccgctaagtacttcttttacagcaatattatgaattttttcaagaccgagattacactggccaatggagagattcggaagcgaccacttatcgaaacaaacggagaaacaggagaaatcgtgtgggacaagggtagggatttcgcgacagtccggaaggtcctgtccatgccgcaggtgaacatcgttaaaaagaccgaagtacagaccggaggcttctccaaggaaagtatcctcccgaaaaggaacagcgacaagctgatcgcacgcaaaaaagattgggaccccaagaaatacggcggattcgattctcctacagtcgcttacagtgtactggttgtggccaaagtggagaaagggaagtctaaaaaactcaaaagcgtcaaggaactgctgggcatcacaatcatggagcgatcaagcttcgaaaaaaaccccatcgactttctcgaggcgaaaggatataaagaggtcaaaaaagacctcatcattaagcttcccaagtactctctctttgagcttgaaaacggccggaaacgaatgctcgctagtgcgggcgagctgcagaaaggtaacgagctggcactgccctctaaatacgttaatttcttgtatctggccagccactatgaaaagctcaaagggtctcccgaagataatgagcagaagcagctgttcgtggaacaacacaaacactaccttgatgagatcatcgagcaaataagcgaattctccaaaagagtgatcctcgccgacgctaacctcgataaggtgctttctgcttacaataagcacagggataagcccatcagggagcaggcagaaaacattatccacttgtttactctgaccaacttgggcgcgcctgcagccttcaagtacttcgacaccaccatagacagaaagcggtacacctctacaaaggaggtcctggacgccacactgattcatcagtcaattacggggctctatgaaacaagaatcgacctctctcagctcggtggagacagcagggctgaccccaagaagaagaggaaggtggctagcgatgctaagtcactgactgcctggtcccggacactggtgaccttcaaggatgtgtttgtggacttcaccagggaggagtggaagctgctggacactgctcagcagatcctgtacagaaatgtgatgctggagaactataagaacctggtttccttgggttatcagcttactaagccagatgtgatcctccggttggagaagggagaagagccctggctggtggagagagaaattcaccaagagacccatcctgattcagagactgcatttgaaatcaaatcatcagttccgaaaaagaaacgcaaagtttga

SEQ ID NO: 149 - protein, 1519 aa, Artificial Sequence
  Synthetic
MDYKDHDGDYKDHDIDYKDDDDKMAPKKKRKVGRGMDKKYSIGLAIGTNSVGWAVITDEYKVPSKKFKVLGNTDRHSIKKNLIGALLFDSGETAEATRLKRTARRRYTRRKNRICYLQEIFSNEMAKVDDSFFHRLEESFLVEEDKKHERHPIFGNIVDEVAYHEKYPTIYHLRKKLVDSTDKADLRLIYLALAHMIKFRGHFLIEGDLNPDNSDVDKLFIQLVQTYNQLFEENPINASGVDAKAILSARLSKSRRLENLIAQLPGEKKNGLFGNLIALSLGLTPNFKSNFDLAEDAKLQLSKDTYDDDLDNLLAQIGDQYADLFLAAKNLSDAILLSDILRVNTEITKAPLSASMIKRYDEHHQDLTLLKALVRQQLPEKYKEIFFDQSKNGYAGYIDGGASQEEFYKFIKPILEKMDGTEELLVKLNREDLLRKQRTFDNGSIPHQIHLGELHAILRRQEDFYPFLKDNREKIEKILTFRIPYYVGPLARGNSRFAWMTRKSEETITPWNFEEVVDKGASAQSFIERMTNFDKNLPNEKVLPKHSLLYEYFTVYNELTKVKYVTEGMRKPAFLSGEQKKAIVDLLFKTNRKVTVKQLKEDYFKKIECFDSVEISGVEDRFNASLGTYHDLLKIIKDKDFLDNEENEDILEDIVLTLTLFEDREMIEERLKTYAHLFDDKVMKQLKRRRYTGWGRLSRKLINGIRDKQSGKTILDFLKSDGFANRNFMQLIHDDSLTFKEDIQKAQVSGQGDSLHEHIANLAGSPAIKKGILQTVKVVDELVKVMGRHKPENIVIEMARENQTTQKGQKNSRERMKRIEEGIKELGSQILKEHPVENTQLQNEKLYLYYLQNGRDMYVDQELDINRLSDYDVDAIVPQSFLKDDSIDNKVLTRSDKNRGKSDNVPSEEVVKKMKNYWRQLLNAKLITQRKFDNLTKAERGGLSELDKAGFIKRQLVETRQITKHVAQILDSRMNTKYDENDKLIREVKVITLKSKLVSDFRKDFQFYKVREINNYHHAHDAYLNAVVGTALIKKYPKLESEFVYGDYKVYDVRKMIAKSEQEIGKATAKYFFYSNIMNFFKTEITLANGEIRKRPLIETNGETGEIVWDKGRDFATVRKVLSMPQVNIVKKTEVQTGGFSKESILPKRNSDKLIARKKDWDPKKYGGFDSPTVAYSVLVVAKVEKGKSKKLKSVKELLGITIMERSSFEKNPIDFLEAKGYKEVKKDLIIKLPKYSLFELENGRKRMLASAGELQKGNELALPSKYVNFLYLASHYEKLKGSPEDNEQKQLFVEQHKHYLDEIIEQISEFSKRVILADANLDKVLSAYNKHRDKPIREQAENIIHLFTLTNLGAPAAFKYFDTTIDRKRYTSTKEVLDATLIHQSITGLYETRIDLSQLGGDSRADPKKKRKVASDAKSLTAWSRTLVTFKDVFVDFTREEWKLLDTAQQILYRNVMLENYKNLVSLGYQLTKPDVILRLEKGEEPWLVEREIHQETHPDSETAFEIKSSVPKKKRKV

SEQ ID NO: 150 - DNA, 3570 bp, Artificial Sequence
  Synthetic
atggccccaaagaagaagcggaaggtcggtatccacggagtcccagcagccaagcggaactacatcctgggcctggccatcggcatcaccagcgtgggctacggcatcatcgactacgagacacgggacgtgatcgatgccggcgtgcggctgttcaaagaggccaacgtggaaaacaacgagggcaggcggagcaagagaggcgccagaaggctgaagcggcggaggcggcatagaatccagagagtgaagaagctgctgttcgactacaacctgctgaccgaccacagcgagctgagcggcatcaacccctacgaggccagagtgaagggcctgagccagaagctgagcgaggaagagttctctgccgccctgctgcacctggccaagagaagaggcgtgcacaacgtgaacgaggtggaagaggacaccggcaacgagctgtccaccaaagagcagatcagccggaacagcaaggccctggaagagaaatacgtggccgaactgcagctggaacggctgaagaaagacggcgaagtgcggggcagcatcaacagattcaagaccagcgactacgtgaaagaagccaaacagctgctgaaggtgcagaaggcctaccaccagctggaccagagcttcatcgacacctacatcgacctgctggaaacccggcggacctactatgagggacctggcgagggcagccccttcggctggaaggacatcaaagaatggtacgagatgctgatgggccactgcacctacttccccgaggaactgcggagcgtgaagtacgcctacaacgccgacctgtacaacgccctgaacgacctgaacaatctcgtgatcaccagggacgagaacgagaagctggaatattacgagaagttccagatcatcgagaacgtgttcaagcagaagaagaagcccaccctgaagcagatcgccaaagaaatcctcgtgaacgaagaggatattaagggctacagagtgaccagcaccggcaagcccgagttcaccaacctgaaggtgtaccacgacatcaaggacattaccgcccggaaagagattattgagaacgccgagctgctggatcagattgccaagatcctgaccatctaccagagcagcgaggacatccaggaagaactgaccaatctgaactccgagctgacccaggaagagatcgagcagatctctaatctgaagggctataccggcacccacaacctgagcctgaaggccatcaacctgatcctggacgagctgtggcacaccaacgacaaccagatcgctatcttcaaccggctgaagctggtgcccaagaaggtggacctgtcccagcagaaagagatccccaccaccctggtggacgacttcatcctgagccccgtcgtgaagagaagcttcatccagagcatcaaagtgatcaacgccatcatcaagaagtacggcctgcccaacgacatcattatcgagctggcccgcgagaagaactccaaggacgcccagaaaatgatcaacgagatgcagaagcggaaccggcagaccaacgagcggatcgaggaaatcatccggaccaccggcaaagagaacgccaagtacctgatcgagaagatcaagctgcacgacatgcaggaaggcaagtgcctgtacagcctggaagccatccctctggaagatctgctgaacaaccccttcaactatgaggtggaccacatcatccccagaagcgtgtccttcgacaacagcttcaacaacaaggtgctcgtgaagcaggaagaagccagcaagaagggcaaccggaccccattccagtacctgagcagcagcgacagcaagatcagctacgaaaccttcaagaagcacatcctgaatctggccaagggcaagggcagaatcagcaagaccaagaaagagtatctgctggaagaacgggacatcaacaggttctccgtgcagaaagacttcatcaaccggaacctggtggataccagatacgccaccagaggcctgatgaacctgctgcggagctacttcagagtgaacaacctggacgtgaaagtgaagtccatcaatggcggcttcaccagctttctgcggcggaagtggaagtttaagaaagagcggaacaaggggtacaagcaccacgccgaggacgccctgatcattgccaacgccgatttcatcttcaaagagtggaagaaactggacaaggccaaaaaagtgatggaaaaccagatgttcgaggaaaagcaggccgagagcatgcccgagatcgaaaccgagcaggagtacaaagagatcttcatcaccccccaccagatcaagcacattaaggacttcaaggactacaagtacagccaccgggtggacaagaagcctaatagagagctgattaacgacaccctgtactccacccggaaggacgacaagggcaacaccctgatcgtgaacaatctgaacggcctgtacgacaaggacaatgacaagctgaaaaagctgatcaacaagagccccgaaaagctgctgatgtaccaccacgacccccagacctaccagaaactgaagctgattatggaacagtacggcgacgagaagaatcccctgtacaagtactacgaggaaaccgggaactacctgaccaagtactccaaaaaggacaacggccccgtgatcaagaagattaagtattacggcaacaaactgaacgcccatctggacatcaccgacgactaccccaacagcagaaacaaggtcgtgaagctgtccctgaagccctacagattcgacgtgtacctggacaatggcgtgtacaagttcgtgaccgtgaagaatctggatgtgatcaaaaaagaaaactactacgaagtgaatagcaagtgctatgaggaagctaagaagctgaagaagatcagcaaccaggccgagtttatcgcctccttctacaacaacgatctgatcaagatcaacggcgagctgtatagagtgatcggcgtgaacaacgacctgctgaaccggatcgaagtgaacatgatcgacatcacctaccgcgagtacctggaaaacatgaacgacaagaggccccccaggatcattaagacaatcgcctccaagacccagagcattaagaagtacagcacagacattctgggcaacctgtatgaagtgaaatctaagaagcaccctcagatcatcaaaaagggcaaaaggccggcggccacgaaaaaggccggccaggcaaaaaagaaaaagggatccgatgctaagtcactgactgcctggtcccggacactggtgaccttcaaggatgtgtttgtggacttcaccagggaggagtggaagctgctggacactgctcagcagatcctgtacagaaatgtgatgctggagaactataagaacctggtttccttgggttatcagcttactaagccagatgtgatcctccggttggagaagggagaagagccctggctggtggagagagaaattcaccaagagacccatcctgattcagagactgcatttgaaatcaaatcatcagttccgaaaaagaaacgcaaagtt

SEQ ID NO: 151 - protein, 1190 aa, Artificial Sequence
  Synthetic
MAPKKKRKVGIHGVPAAKRNYILGLAIGITSVGYGIIDYETRDVIDAGVRLFKEANVENNEGRRSKRGARRLKRRRRHRIQRVKKLLFDYNLLTDHSELSGINPYEARVKGLSQKLSEEEFSAALLHLAKRRGVHNVNEVEEDTGNELSTKEQISRNSKALEEKYVAELQLERLKKDGEVRGSINRFKTSDYVKEAKQLLKVQKAYHQLDQSFIDTYIDLLETRRTYYEGPGEGSPFGWKDIKEWYEMLMGHCTYFPEELRSVKYAYNADLYNALNDLNNLVITRDENEKLEYYEKFQIIENVFKQKKKPTLKQIAKEILVNEEDIKGYRVTSTGKPEFTNLKVYHDIKDITARKEIIENAELLDQIAKILTIYQSSEDIQEELTNLNSELTQEEIEQISNLKGYTGTHNLSLKAINLILDELWHTNDNQIAIFNRLKLVPKKVDLSQQKEIPTTLVDDFILSPVVKRSFIQSIKVINAIIKKYGLPNDIIIELAREKNSKDAQKMINEMQKRNRQTNERIEEIIRTTGKENAKYLIEKIKLHDMQEGKCLYSLEAIPLEDLLNNPFNYEVDHIIPRSVSFDNSFNNKVLVKQEEASKKGNRTPFQYLSSSDSKISYETFKKHILNLAKGKGRISKTKKEYLLEERDINRFSVQKDFINRNLVDTRYATRGLMNLLRSYFRVNNLDVKVKSINGGFTSFLRRKWKFKKERNKGYKHHAEDALIIANADFIFKEWKKLDKAKKVMENQMFEEKQAESMPEIETEQEYKEIFITPHQIKHIKDFKDYKYSHRVDKKPNRELINDTLYSTRKDDKGNTLIVNNLNGLYDKDNDKLKKLINKSPEKLLMYHHDPQTYQKLKLIMEQYGDEKNPLYKYYEETGNYLTKYSKKDNGPVIKKIKYYGNKLNAHLDITDDYPNSRNKVVKLSLKPYRFDVYLDNGVYKFVTVKNLDVIKKENYYEVNSKCYEEAKKLKKISNQAEFIASFYNNDLIKINGELYRVIGVNNDLLNRIEVNMIDITYREYLENMNDKRPPRIIKTIASKTQSIKKYSTDILGNLYEVKSKKHPQIIKKGKRPAATKKAGQAKKKKGSDAKSLTAWSRTLVTFKDVFVDFTREEWKLLDTAQQILYRNVMLENYKNLVSLGYQLTKPDVILRLEKGEEPWLVEREIHQETHPDSETAFEIKSSVPKKKRKV

SEQ ID NO: 152 - DNA, 2154 bp, Artificial Sequence
  Synthetic
ctgcccacctgcagctgtcttgatcgagttatacaaaaagacaaaggcccatattatacacaccttggggcaggaccaagtgttgctgctgtcagggaaatcatggagaataggtatggtcaaaaaggaaacgcaataaggatagaaatagtagtgtacaccggtaaagaagggaaaagctctcatgggtgtccaattgctaagtgggttttaagaagaagcagtgatgaagaaaaagttctttgtttggtccggcagcgtacaggccaccactgtccaactgctgtgatggtggtgctcatcatggtgtgggatggcatccctcttccaatggccgaccggctatacacagagctcacagagaatctaaagtcatacaatgggcaccctaccgacagaagatgcaccctcaatgaaaatcgtacctgtacatgtcaaggaattgatccagagacttgtggagcttcattctcttttggctgttcatggagtatgtactttaatggctgtaagtttggtagaagcccaagccccagaagatttagaattgatccaagctctcccttacatgaaaaaaaccttgaagataacttacagagtttggctacacgattagctccaatttataagcagtatgctccagtagcttaccaaaatcaggtggaatatgaaaatgttgcccgagaatgtcggcttggcagcaaggaaggtcgacccttctctggggtcactgcttgcctggacttctgtgctcatccccacagggacattcacaacatgaataatggaagcactgtggtttgtaccttaactcgagaagataaccgctctttgggtgttattcctcaagatgagcagctccatgtgctacctctttataagctttcagacacagatgagtttggctccaaggaaggaatggaagccaagatcaaatctggggccatcgaggtcctggcaccccgccgcaaaaaaagaacgtgtttcactcagcctgttccccgttctggaaagaagagggctgcgatgatgacagaggttcttgcacataagataagggcagtggaaaagaaacctattccccgaatcaagcggaagaataactcaacaacaacaaacaacagtaagccttcgtcactgccaaccttagggagtaacactgagaccgtgcaacctgaagtaaaaagtgaaaccgaaccccattttatcttaaaaagttcagacaacactaaaacttattcgctgatgccatccgctcctcacccagtgaaagaggcatctccaggcttctcctggtccccgaagactgcttcagccacaccagctccactgaagaatgacgcaacagcctcatgcgggttttcagaaagaagcagcactccccactgtacgatgccttcgggaagactcagtggtgccaatgctgcagctgctgatggccctggcatttcacagcttggcgaagtggctcctctccccaccctgtctgctcctgtgatggagcccctcattaattctgagccttccactggtgtgactgagccgctaacgcctcatcagccaaaccaccagccctccttcctcacctctcctcaagaccttgcctcttctccaatggaagaagatgagcagcattctgaagcagatgagcctccatcagacgaacccctatctgatgaccccctgtcacctgctgaggagaaattgccccacattgatgagtattggtcagacagtgagcacatctttttggatgcaaatattggtggggtggccatcgcacctgctcacggctcggttttgattgagtgtgcccggcgagagctgcacgctaccactcctgttgagcaccccaaccgtaatcatccaacccgcctctcccttgtcttttaccagcacaaaaacctaaataagccccaacatggttttgaactaaacaagattaagtttgaggctaaagaagctaagaataagaaaatgaaggcctcagagcaaaaagaccaggcagctaatgaaggtccagaacagtcctctgaagtaaatgaattgaaccaaattccttctcataaagcattaacattaacccatgacaatgttgtcaccgtgtccccttatgctctcacacacgttgcggggccctataaccattgggtc

SEQ ID NO: 153 - protein, 718 aa, Artificial Sequence
  Synthetic
LPTCSCLDRVIQKDKGPYYTHLGAGPSVAAVREIMENRYGQKGNAIRIEIVVYTGKEGKSSHGCPIAKWVLRRSSDEEKVLCLVRQRTGHHCPTAVMVVLIMVWDGIPLPMADRLYTELTENLKSYNGHPTDRRCTLNENRTCTCQGIDPETCGASFSFGCSWSMYFNGCKFGRSPSPRRFRIDPSSPLHEKNLEDNLQSLATRLAPIYKQYAPVAYQNQVEYENVARECRLGSKEGRPFSGVTACLDFCAHPHRDIHNMNNGSTVVCTLTREDNRSLGVIPQDEQLHVLPLYKLSDTDEFGSKEGMEAKIKSGAIEVLAPRRKKRTCFTQPVPRSGKKRAAMMTEVLAHKIRAVEKKPIPRIKRKNNSTTTNNSKPSSLPTLGSNTETVQPEVKSETEPHFILKSSDNTKTYSLMPSAPHPVKEASPGFSWSPKTASATPAPLKNDATASCGFSERSSTPHCTMPSGRLSGANAAAADGPGISQLGEVAPLPTLSAPVMEPLINSEPSTGVTEPLTPHQPNHQPSFLTSPQDLASSPMEEDEQHSEADEPPSDEPLSDDPLSPAEEKLPHIDEYWSDSEHIFLDANIGGVAIAPAHGSVLIECARRELHATTPVEHPNRNHPTRLSLVFYQHKNLNKPQHGFELNKIKFEAKEAKNKKMKASEQKDQAANEGPEQSSEVNELNQIPSHKALTLTHDNVVTVSPYALTHVAGPYNHWV

SEQ ID NO: 154 - DNA, 4620 bp, Artificial Sequence
  Synthetic
gaactccaggatggcattgggcagcggcaaactgttgtcagaacattgaatgcaactggggaagaaataattcagcaatcctcaaaaacagatgccagtattctacaggaaaaattgggaagcctgaatctgcggtggcaggaggtctgcaaacagctgtcagacagaaaaaagaggctagaagaacaaaagaatatcttgtcagaatttcaaagagatttaaatgaatttgttttatggttggaggaagcagataacattgctagtatcccacttgaacctggaaaagagcagcaactaaaagaaaagcttgagcaagtcaagttactggtggaagagttgcccctgcgccagggaattctcaaacaattaaatgaaactggaggacccgtgcttgtaagtgctcccataagcccagaagagcaagataaacttgaaaataagctcaagcagacaaatctccagtggataaaggtttccagagctttacctgagaaacaaggagaaattgaagctcaaataaaagaccttgggcagcttgaaaaaaagcttgaagaccttgaagagcagttaaatcatctgctgctgtggttatctcctattaggaatcagttggaaatttataaccaaccaaaccaagaaggaccatttgacgttcaggaaactgaaatagcagttcaagctaaacaaccggatgtggaagagattttgtctaaagggcagcatttgtacaaggaaaaaccagccactcagccagtgaagaggaagttagaagatctgagctctgagtggaaggcggtaaaccgtttacttcaagagctgagggcaaagcagcctgacctagctcctggactgaccactattggagcctctcctactcagactgttactctggtgacacaacctgtggttactaaggaaactgccatctccaaactagaaatgccatcttccttgatgttggaggtacctgctctggcagatttcaaccgggcttggacagaacttaccgactggctttctctgcttgatcaagttataaaatcacagagggtgatggtgggtgaccttgaggatatcaacgagatgatcatcaagcagaaggcaacaatgcaggatttggaacagaggcgtccccagttggaagaactcattaccgctgcccaaaatttgaaaaacaagaccagcaatcaagaggctagaacaatcattacggatcgaattgaaagaattcagaatcagtgggatgaagtacaagaacaccttcagaaccggaggcaacagttgaatgaaatgttaaaggattcaacacaatggctggaagctaaggaagaagctgagcaggtcttaggacaggccagagccaagcttgagtcatggaaggagggtccctatacagtagatgcaatccaaaagaaaatcacagaaaccaagcagttggccaaagacctccgccagtggcagacaaatgtagatgtggcaaatgacttggccctgaaacttctccgggattattctgcagatgataccagaaaagtccacatgataacagagaatatcaatgcctcttggagaagcattcataaaagggtgagtgagcgagaggctgctttggaagaaactcatagattactgcaacagttccccctggacctggaaaagtttcttgcctggcttacagaagctgaaacaactgccaatgtcctacaggatgctacccgtaaggaaaggctcctagaagactccaagggagtaaaagagctgatgaaacaatggcaagacctccaaggtgaaattgaagctcacacagatgtttatcacaacctggatgaaaacagccaaaaaatcctgagatccctggaaggttccgatgatgcagtcctgttacaaagacgtttggataacatgaacttcaagtggagtgaacttcggaaaaagtctctcaacattaggtcccatttggaagccagttctgaccagtggaagcgtctgcacctttctctgcaggaacttctggtgtggctacagctgaaagatgatgaattaagccggcaggcacctattggaggcgactttccagcagttcagaagcagaacgatgtacatagggccttcaagagggaattgaaaactaaagaacctgtaatcatgagtactcttgagactgtacgaatatttctgacagagcagcctttggaaggactagagaaactctaccaggagcccagagagctgcctcctgaggagagagcccagaatgtcactcggcttctacgaaagcaggctgaggaggtcaatactgagtgggaaaaattgaacctgcactccgctgactggcagagaaaaatagatgagacccttgaaagactccaggaacttcaagaggccacggatgagctggacctcaagctgcgccaagctgaggtgatcaagggatcctggcagcccgtgggcgatctcctcattgactctctccaagatcacctcgagaaagtcaaggcacttcgaggagaaattgcgcctctgaaagagaacgtgagccacgtcaatgaccttgctcgccagcttaccactttgggcattcagctctcaccgtataacctcagcactctggaagacctgaacaccagatggaagcttctgcaggtggccgtcgaggaccgagtcaggcagctgcatgaagcccacagggactttggtccagcatctcagcactttctttccacgtctgtccagggtccctgggagagagccatctcgccaaacaaagtgccctactatatcaaccacgagactcaaacaacttgctgggaccatcccaaaatgacagagctctaccagtctttagctgacctgaataatgtcagattctcagcttataggactgccatgaaactccgaagactgcagaaggccctttgcttggatctcttgagcctgtcagctgcatgtgatgccttggaccagcacaacctcaagcaaaatgaccagcccatggatatcctgcagattattaattgtttgaccactatttatgaccgcctggagcaagagcacaacaatttggtcaacgtccctctctgcgtggatatgtgtctgaactggctgctgaatgtttatgatacgggacgaacagggaggatccgtgtcctgtcttttaaaactggcatcatttccctgtgtaaagcacatttggaagacaagtacagataccttttcaagcaagtggcaagttcaacaggattttgtgaccagcgcaggctgggcctccttctgcatgattctatccaaattccaagacagttgggtgaagttgcatcctttgggggcagtaacattgagccaagtgtccggagctgcttccaatttgctaataataagccagagatcgaagcggccctcttcctagactggatgagactggaaccccagtccatggtgtggctgcccgtcctgcacagagtggctgctgcagaaactgccaagcatcaggccaaatgtaacatctgcaaagagtgtccaatcattggattcaggtacaggagtctaaagcactttaattatgacatctgccaaagctgctttttttctggtcgagttgcaaaaggccataaaatgcactatcccatggtggaatattgcactccgactacatcaggagaagatgttcgagactttgccaaggtactaaaaaacaaatttcgaaccaaaaggtattttgcgaagcatccccgaatgggctacctgccagtgcagactgtcttagagggggacaacatggaaactcccgttactctgatcaacttctggccagtagattctgcgcctgcctcgtcccctcagctttcacacgatgatactcattcacgcattgaacattatgctagcaggctagcagaaatggaaaacagcaatggatcttatctaaatgatagcatctctcctaatgagagcatagatgatgaacatttgttaatccagcattactgccaaagtttgaaccaggactcccccctgagccagcctcgtagtcctgcccagatcttgatttccttagagagtgaggaaagaggggagctagagagaatcctagcagatcttgaggaagaaaacaggaatctgcaagcagaatatgaccgtctaaagcagcagcacgaacataaaggcctgtccccactgccgtcccctcctgaaatgatgcccacctctccccagagtccccgggatgctgagctcattgctgaggccaagctactgcgtcaacacaaaggccgcctggaagccaggatgcaaatcctggaagaccacaataaacagctggagtcacagttacacaggctaaggcagctgctggagcaaccccaggcagaggccaaagtgaatggcacaacggtgtcctctccttctacctctctacagaggtccgacagcagtcagcctatgctgctccgagtggttggcagtcaaacttcggactccatgggtgaggaagatcttctcagtcctccccaggacacaagcacagggttagaggaggtgatggagcaactcaacaactccttccctagttcaagaggaagaaatacccctggaaagccaatgagagaggacacaatgtag

SEQ ID NO: 155 - DNA, 5120 bp, Artificial Sequence
  Synthetic
tgggcatgtcagtttcatagggaaattttcacatggagcttttgtatttctttctttgccagtacaactgcatgtggtagcacactgtttaatcttttctcaaataaaaagacatggggcttcatttttgttttgcctttttggtatcttacaggaactccaggatggcattgggcagcggcaaactgttgtcagaacattgaatgcaactggggaagaaataattcagcaatcctcaaaaacagatgccagtattctacaggaaaaattgggaagcctgaatctgcggtggcaggaggtctgcaaacagctgtcagacagaaaaaagaggctagaagaacaaaagaatatcttgtcagaatttcaaagagatttaaatgaatttgttttatggttggaggaagcagataacattgctagtatcccacttgaacctggaaaagagcagcaactaaaagaaaagcttgagcaagtcaagttactggtggaagagttgcccctgcgccagggaattctcaaacaattaaatgaaactggaggacccgtgcttgtaagtgctcccataagcccagaagagcaagataaacttgaaaataagctcaagcagacaaatctccagtggataaaggtttccagagctttacctgagaaacaaggagaaattgaagctcaaataaaagaccttgggcagcttgaaaaaaagcttgaagaccttgaagagcagttaaatcatctgctgctgtggttatctcctattaggaatcagttggaaatttataaccaaccaaaccaagaaggaccatttgacgttcaggaaactgaaatagcagttcaagctaaacaaccggatgtggaagagattttgtctaaagggcagcatttgtacaaggaaaaaccagccactcagccagtgaagaggaagttagaagatctgagctctgagtggaaggcggtaaaccgtttacttcaagagctgagggcaaagcagcctgacctagctcctggactgaccactattggagcctctcctactcagactgttactctggtgacacaacctgtggttactaaggaaactgccatctccaaactagaaatgccatcttccttgatgttggaggtacctgctctggcagatttcaaccgggcttggacagaacttaccgactggctttctctgcttgatcaagttataaaatcacagagggtgatggtgggtgaccttgaggatatcaacgagatgatcatcaagcagaaggcaacaatgcaggatttggaacagaggcgtccccagttggaagaactcattaccgctgcccaaaatttgaaaaacaagaccagcaatcaagaggctagaacaatcattacggatcgaattgaaagaattcagaatcagtgggatgaagtacaagaacaccttcagaaccggaggcaacagttgaatgaaatgttaaaggattcaacacaatggctggaagctaaggaagaagctgagcaggtcttaggacaggccagagccaagcttgagtcatggaaggagggtccctatacagtagatgcaatccaaaagaaaatcacagaaaccaagcagttggccaaagacctccgccagtggcagacaaatgtagatgtggcaaatgacttggccctgaaacttctccgggattattctgcagatgataccagaaaagtccacatgataacagagaatatcaatgcctcttggagaagcattcataaaagggtgagtgagcgagaggctgctttggaagaaactcatagattactgcaacagttccccctggacctggaaaagtttcttgcctggcttacagaagctgaaacaactgccaatgtcctacaggatgctacccgtaaggaaaggctcctagaagactccaagggagtaaaagagctgatgaaacaatggcaagacctccaaggtgaaattgaagctcacacagatgtttatcacaacctggatgaaaacagccaaaaaatcctgagatccctggaaggttccgatgatgcagtcctgttacaaagacgtttggataacatgaacttcaagtggagtgaacttcggaaaaagtctctcaacattaggtcccatttggaagccagttctgaccagtggaagcgtctgcacctttctctgcaggaacttctggtgtggctacagctgaaagatgatgaattaagccggcaggcacctattggaggcgactttccagcagttcagaagcagaacgatgtacatagggccttcaagagggaattgaaaactaaagaacctgtaatcatgagtactcttgagactgtacgaatatttctgacagagcagcctttggaaggactagagaaactctaccaggagcccagagagctgcctcctgaggagagagcccagaatgtcactcggcttctacgaaagcaggctgaggaggtcaatactgagtgggaaaaattgaacctgcactccgctgactggcagagaaaaatagatgagacccttgaaagactccaggaacttcaagaggccacggatgagctggacctcaagctgcgccaagctgaggtgatcaagggatcctggcagcccgtgggcgatctcctcattgactctctccaagatcacctcgagaaagtcaaggcacttcgaggagaaattgcgcctctgaaagagaacgtgagccacgtcaatgaccttgctcgccagcttaccactttgggcattcagctctcaccgtataacctcagcactctggaagacctgaacaccagatggaagcttctgcaggtggccgtcgaggaccgagtcaggcagctgcatgaagcccacagggactttggtccagcatctcagcactttctttccacgtctgtccagggtccctgggagagagccatctcgccaaacaaagtgccctactatatcaaccacgagactcaaacaacttgctgggaccatcccaaaatgacagagctctaccagtctttagctgacctgaataatgtcagattctcagcttataggactgccatgaaactccgaagactgcagaaggccctttgcttggatctcttgagcctgtcagctgcatgtgatgccttggaccagcacaacctcaagcaaaatgaccagcccatggatatcctgcagattattaattgtttgaccactatttatgaccgcctggagcaagagcacaacaatttggtcaacgtccctctctgcgtggatatgtgtctgaactggctgctgaatgtttatgatacgggacgaacagggaggatccgtgtcctgtcttttaaaactggcatcatttccctgtgtaaagcacatttggaagacaagtacagataccttttcaagcaagtggcaagttcaacaggattttgtgaccagcgcaggctgggcctccttctgcatgattctatccaaattccaagacagttgggtgaagttgcatcctttgggggcagtaacattgagccaagtgtccggagctgcttccaatttgctaataataagccagagatcgaagcggccctcttcctagactggatgagactggaaccccagtccatggtgtggctgcccgtcctgcacagagtggctgctgcagaaactgccaagcatcaggccaaatgtaacatctgcaaagagtgtccaatcattggattcaggtacaggagtctaaagcactttaattatgacatctgccaaagctgctttttttctggtcgagttgcaaaaggccataaaatgcactatcccatggtggaatattgcactccgactacatcaggagaagatgttcgagactttgccaaggtactaaaaaacaaatttcgaaccaaaaggtattttgcgaagcatccccgaatgggctacctgccagtgcagactgtcttagagggggacaacatggaaactcccgttactctgatcaacttctggccagtagattctgcgcctgcctcgtcccctcagctttcacacgatgatactcattcacgcattgaacattatgctagcaggctagcagaaatggaaaacagcaatggatcttatctaaatgatagcatctctcctaatgagagcatagatgatgaacatttgttaatccagcattactgccaaagtttgaaccaggactcccccctgagccagcctcgtagtcctgcccagatcttgatttccttagagagtgaggaaagaggggagctagagagaatcctagcagatcttgaggaagaaaacaggaatctgcaagcagaatatgaccgtctaaagcagcagcacgaacataaaggcctgtccccactgccgtcccctcctgaaatgatgcccacctctccccagagtccccgggatgctgagctcattgctgaggccaagctactgcgtcaacacaaaggccgcctggaagccaggatgcaaatcctggaagaccacaataaacagctggagtcacagttacacaggctaaggcagctgctggagcaaccccaggcagaggccaaagtgaatggcacaacggtgtcctctccttctacctctctacagaggtccgacagcagtcagcctatgctgctccgagtggttggcagtcaaacttcggactccatgggtgaggaagatcttctcagtcctccccaggacacaagcacagggttagaggaggtgatggagcaactcaacaactccttccctagttcaagaggaagaaatacccctggaaagccaatgagagaggacacaatgtagtcgtttaaaccgctgatcagcctcgaaacttgtttattgcagcttataatggttacaaataaagcaatagcatcacaaatttcacaaataaagcatttttttcactgcattctagttgtggtttgtccaaactcatcaatgtatcttagtaagttttttaacaagcatgggacacacaaagcaagatgcatgacaagtttcaataaaaacttaagttcatatatccccctcacatttataaaaataatgtgaaataattgtaaatgataacaattgtgctgagattttcagtccataatgttaccttttaataaatgaatgtaattccattgaatagaagaaatac

SEQ ID NO: 156 - DNA, 248401 bp, Artificial Sequence
  Synthetic
gtaagtctttgatttgttttttcgaaattgtatttatcttcagcacatctggactctttaacttcttaaagatcaggttctgaagggtgatggaaattacttttgactgttgttgtcatcattatattactagaaagaaaattatcataatgataatattagagcacggtgctatggactttttgtgtcaggatgagagagtttgcctggacggagctggtttatctgataaactgcaaaatataattgaatctgtgacagagggaagcatcgtaacagcaaggtgttttgtggctttggggcagtgtgtatttcggctttatgttggaacctttccagaaggagaacttgtggcatacttagctaaaatgaagttgctagaaatatccatcatgataaaattacagttctgttttcctaaagacaattttgtagtgctgtagcaatatttctatatattctattgacaaaatgccttctgaaatagtccagaggccaaaacaatgcagagttaattgttggtacttattgacattttatggtttatgttaatagggaaacagcatatggatgataaccagtgtgtagtttaatttcaacttgtggtgtcctttgaatatgcaggtaaagatagattagattgtccaggatataatttggttgctaaattacatagtttaggcataagaaacactgtgtttattacacgaagacttaattatttttgcatcttttttagctcaaattgttcatgttgcaatagtcaatcaagtggatttgaattgtagccaatttttaatgccagaaaatactgattaagacagatgagggcaaaaaacacccagtagtttattaaatactttagatatttcaaaatgctggattcacaaaagcagtatcacatttgactttacaagtcttcattctcaaatatgtttccatagtaaatatgccctttaatattaaggagttaagcatttaaacacctatttatatgataagctatttaaacacagaaaatatttttaaaaccttgtgtaattatatgtgtatcaatcaaacttgcatgcacaccagcgttggcatttgtatagagaggaaatgtatggattcccaatctgctttaatatagaagatacattttaaaaatagcactgaagtgaattttgggctaatgtagcataatggggtttctgcctgagaggcagaaacatattagagttatataaaatgttttggggtagatatagaaaccacttgccattttcaatgatatccaacccaaggtagttatatatttcaatttatattttattatcaaattagtacttattgtgaaaaaaatcaagtaacatagaaatttgtaaaagtacctccattctactctttggaggatagttgttcagtatgaattttgctacatatttcaggctgggtttcttggaaagccattgtaaaatggagatttgtatgtagaaggttaactagggagtacttttacgatgaagcaatttgttttgatgtaacttggtgtagttttcttcatgtttcttgttcttgaagtcagttaagctcttgaatctgtgcatttaacatttcatcaaatttagaaacctttcaaccatttttttaaaaaaaatggaactccaattgtacatttattaggctccttaaagtgccccactactcactgatgttatgttcattgtctgtttggtctctcttttctctgtaatttgttttatataatctctattgtcaaattgactaatctttttcaaagtctaatctatggctaatcccatgtagtatatatttttaacatcagacattttcatctcttagaagtaaaagttgggtctttttatttcttccatgtgtctactcaacatgttcagtctttactttcttgactatatggaatacagatataataactgttagaatattcttctctactaattttatcatctgtgtctattctgggttaatttaaattgatttatttttctcctcattaagtgtgttgtttaactgcttctttggatgactggtaatttttgactatatgccagacattgtgaattttaacttagcgcgtgcttgatacttcaaataaattcaaatatattgaaataaatattctcaaacctcgttctggaacacagttaattcacttggaaacaatttgatcttttgagaatcttccttttatgctttgttatgaccagaacagtgtaagtttagggctactttttccccactactgaggcaaaacccttctgagtactctctctgatgtcctgtgaatgataaaatttttcactggggctcgtgggaacaggtggtattactagccacgtgtgagctctggtgattgtttcctttaattcttttgtgaagttctttccttagctttgagtggttttcttgcatacatgaactgatcaagactcagatgaagaataaaataaagctttctacaaatctccaaaatttcctctgtgtatatatcacctctctggtattttgccctgtgatcactagtcagccttgggctgctgaaactctcagcttcatcttttaacaaaagcctcctggcaaggatcactgtccttcaatgtctgatgttcaatgtgttgaaaaccgttgtagcatatattttgtctttttttttttttttttttttttaagtgtttcaggtgtttcaggcaggagattaagttcagcctcctttactccaacttgaaaacaagtccaaaacaaactattttgatgtaatttgatcttttaatacattaacattacacaattttgtgaatatatcataatttaaaattttcagagaatgtctaatggtcctcatttcttgacagtgtggtttagttgaaactgatgaacattttatcaaaacttttcccctcaattggatacttttttttttttgagatggaattttgcttttgtcacccaggctggagtggcatgatctcagctcactgcaacctctgcctccaggcttcaagcaattctcctgccttagcctcccgagtagctgggattacaggtgcccacccccacacctggctaatttttgtatttttagtagagacgagatttcaccatgttggtcaggctggtctagatctccgacctcaggtggtctgcctgtctcagcctcccaaagtgctgggattgcagacgtgagccaccatgcctggccaactggataattttaaaaagaccattttatttagtctattttttctcaatctatagatgagataagaaaaatcattctagatgtccaaggaaaaattctttcagaaaagagctgtgaatgatatcacaaaccccccaaacagttaaggtatttctttcctggttattttatgtccaaaatcatgcatatgaacatgtgcacacacatgagcgtgcacacacacatgaatacatatacacgcacataatgtaccttaggttatctttccattctgagtaattatcgtaaaatgggtaaaatcaaccccgtaagataccttcatcgataaggcaaatcaaagctttggtaatttctgctatcttggcctttgttgattgactaataatgaataagagaatgagtttcaatatttactatgaaattattttagaagacaggatgtagacagtggctgttagcaggcaattgtttggcatgagccagtaatggttactgtgaaaaaaatcaaccaagcagcccatatattaaacaaacacacgcagaagcacgttggagtctgaagcctcatatgtacaattttcagtaaagaaataacttttagatatgaaataaacaaatagatatatgttgtaaacttgtccctatgtattttgatcaaattgcatcatatttttttcactttaaagaagagaatttagtgctttaactgagacttagtgttatcattcaaaatatactgactgccaatagcagtagaaagataatctggttccatgcaactctattttttttcctctgtcgcaagtaaaagacaaaattaagtacatgaattagtgctttttgaagatattccagagcaatataccatgccactatggagaacctctctaaaaatatcccatttttttacctgagaaaaatattgatcatgttatatgccactcaaattggtttattaaattcgttgaatgatatcagcatctcttaatgcattcactaaacaagcagtaattgagtgcatatacaaagttttatcatccaccaaaacagtgacaatccacatgaggctctaatagaagtttagaaagggggttaagtggttaaatgctggactcagaaagattggattcaaatcccaggtcctttagcttaatagttgtagaatcttgtgaaaatatcttaattcttttcatgtctctgatttctcttctctaaaatggaaatataaatgagatgtgtataaagccacttggaatagcattttgcacaaaataattactcattaaatgtaagcccctattataactaatcactctttataagtgattagttcatatcaatacaaactaagacttatttactgaattatcgtctctaaacatccacactgcagaaaaaccaacctggaaatttcataaaaccttatttttatgtagtataatttcttctcaaagcataagggctcttggattaggaattgaggaaaattccaattcagccaaacgcatctgtttcagatagctgacacttctgcctactcatttcctagctaacaagaagaaatgttaatgggagttttcaaaggaaaagctgaacaccatgaaggaaagtgacacaaataatgttagctcatatattgacagggtgaatttgtgtgctttcaagtcccttcagtgaaaataggaaagtagaaattataaaatgccctaacatttaaagctagcatgttcttggagactaggaaaaaataagttttaaaacatgggctatgatagaatgagatggaaaatgtttgtagttgccagtagaaacaataacaattaccattagattaagtatttaaaccagctgaatatttttattaatggaaatggcatctgttttatgaaataatgctgctgaatgaaccatattaaaaatgaccagtatttcctgcagaacgttgtcgcagacatacaagcctgagaccctaaaatcttaaggtattccatttgaaatcgaccttaagacattaacagtagtggtattgtttagatgaaattttttaggctttaaatcaacaaatgttaagcagacatggggagcgaaacaccagtgtgttattctgacatgaataaactgctgtttttagggaaaaaatatagtcttgttaaggttaagctaattggttttctggtatcttttgcaatgttagtgtgttttactgctccataacctatgttatatggtaaatgtgcaatatatttatatatgttgctgtaaagaaatgtaataaaaaactgtttactttgtgatatgaaagtaaaaatttattcattgtcattgagcatacagaagtaaatatggattacatatgtcatattttaatgttcacatggtcccaccatcaaatgttgaaaaacttatagtttaacgtcatattctattgaagaaaaatacactcccttttctcaaatgtgaaatgtccagagagaatggaaaattacatataaagcatgtagttatagcatggtgaccctgctgtgatctctcagatgaggaacaaaagggagaaagaaagagcacactggtgctttggagttgagagaaggcaaaaaaagagtacaaaaatgtcaaagccaagtttagctgctcttcagctctccctttagctgctcttcagctttaccttaccatggttattagtgattgaagaaaattctaaagcactttttaaaggacccaattctgaagagtttagattcagagagcacaatggagttggagtgactcctgctcaaaagtttgagacaagcgagtccatgaaaagaccgtcctcctcttaatggaaatacccaggttttctcattcttctcgccttgctttcagcactcgcagcccagaaagcccttatctaacaggtactgccgttgaaaggtcattgacttgtacaaaaatgatgagtgctgaatagatgtgcataggtcactgacagtatctgctacagagaatgagttttcgtatttttattaggatacacctaacatggcaatctactgcctcaaagaactctataggaggtaagtgaatttatattaatacagattgaattaaaggataatctagaaaaaggcatatgatgtaaaaaaatcagacacaagtatattttctgtatagtcagtttttacattgtgatttcaccagctggctgctgagtttgacggcttcttaacagccacactgctgagattcaaatgctgatagaaactttgatggaaaaatcactggagtaaatatttctaccatctgttgcccttcactgggaccctaacgttaagaataattcataccattgcttgtcctttatatttccccagcagtaataaaatttcataagattttgttttgtggtcacaaagctatcctggtttctgtaactagaagacatacactagcataagggaatcagccggaaaatttactgctaagagaatttgtctctagtcacttactttaaggttacagcaatgtgtaagtgtgggaatacattttaaaatgagcttttcaaagttattagctggtagtggcatgagagttaagtctcttaatacagttaaacagttgggcacttcatccttgcgtaaatattgttacccttttattgctgcttggaaactcctctgcaactttttggcccctatccatcttttcagaagtagtaaataaccaatttactgggagtgtggtaccaggcagaaattccgagaggggctttcaatccttgcccatcaagtgtatctttcagaaataagtatattaaaataattggataatttcagtggcttgttattagacttccgttgtccagcatggcatgtttaagaagatgacagattttcatacattattggaaagaagcaagaacaaaaaaacataacttactgtagtaaccacggtaaagaactgcttaaaatgcaggataaacatgtcatccctaagggattcccattcttagagcatgaaattatcaagagagtaagagactacaaaaaatgagaagaatgctgattgcaaattccaaatagaaaaaatcaaaacaaaactgcgcaccatcattctggaagcaatgagaagcagaaattgtcatttaatgaaatgtaagattaaagttaatagaagtaattttcatgaaataatattttgcaaggacgatgttccagccatattgatcttcgtgttttcttttcacatcccttcttactgttccctagaatgcttgtttctacctttaaatttgcttttctctctaccagagggctctaccctatctccagtttctcaccatgtcccaatctactccctctcagaatttttgtacacttccctttatatatatttgtgctctaattttatattcacagatatgccttttgtaactcccccatcttaaagaaagcacacacgtacgcacacatgcacacacacaaaattgaactctttctgggagatctgcttaactttcttcataactctgtcacttgctgaaactgtagtatgtgttttcatgtttattatcttttccattagaatgaacatattttgggtacttggtctttctcgatcaccaatatacctcggtacgtagaaaaattgattcatatattgaaaatgtaatattcagtagaacgaataaatacataaataaatttaaaaatgatacttttattgtattacctgagacaaatgatccccaagtttgtccttgcttttcatagccaaaacattctctcttacattgagcttccttcacctcttctgtgtacagagcacttaaaattttcacattgcctgatactttaacaatatgatggccctgttctcttacccattggagcatatgttaaataccagaacccatgtaacaaacatatattgtgatcctactgtgtgcaaagcagatactgcttgctgctaggaatacagagctgactaagagctccttttctctttatgagctcacagtctcatgagttcaacgtcttaaggcacaacgtctaaagcaaagggcagtaagtaaacactccagaaagtactggatctggcctaggacaaatggtgggttgtttttccagctgttatttttcctgccccctaattgacagtcctccattacacctctgggatacctagtctgacttgggaaaacctgactttgggaatcagaggcagtctctcttgcttatatatgaggaactctaatggatacttactgtcattagagaaactctgcttctagcctggctccttttgtaaagaaggttgagtccccttggagagcctgcagaacataaccatttgcatgtaatgaacagtttgtaatactttgagattgatgtgcaatttctatttgacaagggaaaaacaattaggattaaccgtggtcgtatatcccagaataccaacgttgtttccacactctaagtgttgttgggtcattatatgagattcataattttgtcctgttgtacccacgtttgcattaccattcagtcttaatttattataccctattaaaagtttttttggtaatttgttcttattgctactcaggcattaaaatgtctgcaggctgtgaaaatgaataaatttaatgtggcagcatagttctcaaaatcctggctttacaactcatagtacaggcttgtattgtaaatcctagttaacatggatttatttgaaaatccaattttactgctaatcttaaataacacatttttcaaacattttatccttgaatttctatttttttataatttatggctgttgtatgtatttacaaaaggacaatgtgtgtacttttaaatactagtaatggattgctgaaacaactgtaactttaaaacaatgcaattgttaaaaaaataaactgtgcagcctggcttaatggaggcttatgaacatatgattaagatatatgctataataagcaaattcactcaactgatagttcataggaactttcaaatttaatctcataaccagtgctatccttcaaagaatggtcagggcaatttaacgagtacatgaccacgcaagataatttcattgaagagtggctgaactgttgaaatattttctagtctccttgggatatcattaagagcagaaattttgaaatggaattgtaatgatgttcagaaaagataagtaggtaactctcttaatacgttttgtgctgctgtaacaaagtacctaagactaggtaataatttgtaatgaacaaaaatgtattggctcacagttctggagactaggaagtctaacattaaggtgtcagcctctggcgagggcctacttgatatgtcatcacatgatggacgattagagggcaagaaagatcaaaagggggctgaactcccacttttataagggaaccaaacccactcgtgagggtggagccctcaatccttaatcacctcctaaagctcccaccccttaatactgtcacaatggcaattaaatttcaacatcagttttggagggaaaaacattgaaaccatagtagtgatactgactactaccacacagggcttgggaggctaccctagctgttgcacccaagagatgaatcttctaatgtgattacctttatcattttttttactttattaaaatacttttattttacatgtatacttttgtctacccaccatttccatgtctgaccactgctactactatgtcctagcataacattccatacatccttaaaaccaagcaaagggtggagttccatctttaaaaactaaacaggcattttggacaacacattcttggcaatggaatctggacaacatttatcaaacatggtagggaaggttctcactctgcattatcaaaacgacagccagatatcaactgttacagaaacgaaatcagatggaaaatttttaacaaattgtttaaactattttcttagagagacttcctccactgccagagatcttgaatagcctctggtcagtcatctggaagcaattcttcacataattcatgaacttggcttccactttaggaagagaaccacctttttctatacttgcttgcatttttgctttaatgtcttctacagaactaggtcctttgggtgttttaggagtttttccttgttttgaaggattcttgtccttttgatcttggtgttgacggttttgagtcttttccattccgatttgacttttgtgcatttttggctggagtatctcatatagatttcttcactggcgctttttcttcagtttcctcatcatcaaaatcatcatcatcatcaaaatcatcatcttcatcagcagcaagttttacttttttctgtggaaccttgctaccacctccaggagcagatcgctttccagatatacttatgagtttcacatcctcctcctgttcgtcttctgactctgtatcttcctccccagctactaaatgctgtccactcacatgcactggccctgaaccacacttcaaccgtaagaccactgatggtgttatttcaaagccctcaagggaaaccatgggctgtacagacattttcaaagctgccagtgttactttaattggactgcctttgtaactcattgcctctgcttcaacaatgtgcaatttatcctttgccccagcccctaaactgaccgttcttaaagataactgttgctcaatttcattattatccaccttaaagtgatcatctttgtcggcctttagttcacaaccaaaaagatagttttggggcctcagaggactcatgtccatcatcgtccatcaggtggcaggacgcacttaggtgggagagaaggcagatgatgataaaggaccactgctcaagagaacagctgtgcaggacagaatcacaccagggagattacctttatcttagaaaacctgaacatcttgtgtactttgacacttctctacatttcacctaacctttaacatcaacacatttattcagaaaacttttacttttggagctgctctgtgtcaggctctatgctaggtgctcaggatattgaaattgatacaatcctaacctattcacatataatccaaggtttgctgaaattgatggacatttaaacaattgaaacatttaagtggtataattagcaaatggacatttaagccataaaaatagcatctaatagatataatagaggtcggtacaccattgatgagtcagagcagaggcaacccaaagagtaactagccagaagaattgggaaagcttcatagagagagcgatatgaaaataagggagagaattgtaaatccatgaaaatgagaaaaagttgaaaagtgatggtgtcagaaaaacttgtggtatgataatgacaagatgagaggaactcttggtaagcgtgttggatgcatggaaagaaatggcacaaaataatgctgaggacattttttattttattgttggttttgttttggttaatttcattttttaaatctagtatgctagtgttcattgtccaaactgtgaatcataaactcagtttgtggatcaacaccggcctttgatttttagtgaaacaaaatagaaaatatcagcattcatcacaaatagatgtttcacagattttttgttttaattgcgactgtgtgtgtgtgggtgtgtgtgtgtgtgtgtgtgtgtgtgtgtgtatgtgagagagagagagagagagagagagagagatggcttggatgtttatcacctccgaatcttatattgaaatgtgatttccaatgttggaggcagggcctggtaggtgtgattggatcatgtgggtggatccttcatgaatgatccctttggtgacaagttagttcatgctatatgtggttgtttaaaagagtatgagacctcaacccccacctgtttcctgctctcccctttgccttccaccatggttggttgtaaacttcctgaggctctcaccagaagtagatgccagtgacatgcttcctgtacagcctgcagaaccgtaagtcaaaagaaaaccccttttctttttaaagcacccagtttcaggtatttctttatagcaatgcaagaagggactaacacagttgtatgtgtatgtgtgtgttgggtgatttctggttgagtgtcacaaggttgtaatatggtgagtgtaaggaagtataagttttagaaaattaagaagccagttcagaaaactaatacttttggaaaatagtacaaaatcaactttacaagaatatacacagaaagatgtaatacaagatttatttcattgcagtaatttataaagttggtttagtgccttgcttttgcatgctgttttaaaaattaccaagaatatgacttcatgtgattttgaaatactcccagcaagataggtagaaaaggtattcttataactcttagacaaaaatttcggaaagtttaaacgctttatcccaaatcataaagctaataaatgaagaatctgggattcaaacaccatattttttttactgttcatcagctagaagttagaaatgttaagccaaaaacattaagtcactgctctgcctaataaatcttgaggaaactaataaaaagaataataccactgactacaggacaaggtcttcctaagagaccttaaatatattaagtgatgaagatgaaacttcttttattcataaaaatgttatttagttatgagtagagctctaattaaacttattttatattgtcatcagtaaagttgagacataacatatttattaatataattataatttgacccatagtgtattaaaagaaggatgttaaaaggagttgttattagagatgatgttagggttgttgatgataataacagtagtcataacataacaaagcacttcataatttaagaagtgccttcaattacattgttactctcatggtaatctctgtttgatatatagatttggcggattctatatcactctaagacataggttactgaggtgacggaggaatttagcaagcggctgtcaaatggaggacatgagcattggattgtgtatggcaagggctgatggtctctaagaaagcctcttggtttccacagggcagaagccctttgaagatcatagccaaggatttagtaattgcctccctttcagaataccctcaagagaaaagcccaccataagacatggttccctacaggcaaaactgcttttccttaaaatttactgttccctgaatatcagccttctttggctcattcaacatagttttcttaagtttcaggacagtgctgcagaccaaaagtttcaacattgaggaaaacaatactacttgtgcagtgaccctacctcagtcagggaggcagatgcctgcctttatgtgagggaataaggaatcaatcatatttccagcactcaagaaagccagtctagtgcagggagagatagatacataaacctcaaagttatgatatagcataatagttttaaatttccataataactgtattttaaaagttttatagaaacagaagagatgacctcagtctggaaaagccagcttggagaatggcaaccaatattaagtggcaaaagctttgggatcccaggcctccagatggagggtgatagcatgggccagacaggtaggttaggaaaactttgcaaaggacattacacggtacacagacaagtctgtgttttagcctataaaccacagttgcagaatgtgtttgagcaaaggcttttggggatgagatttgcacttttcaagatttaagtttgtttaggatacttacggtttgctgtatacttcctgggtttttacattataattacggtttgaactttaaaggaaaactgcagtttagcatacttgaaagagtgcaacttcaagtcatgattggagacagatatttaacagattttgtgatcctgtgatgcttattttcttctcagacataccacatgacaatcatttttaaacagtttatttctactttagcatccatctgaaggtgttgtgtatgttttctgcttgaaaataaagcagtgggctgggtgcggtggctcacgcctgtaatcccagcactttgggaggccgaggcaggcagatcactaggtcaagaaatcgagaccatcctggccaacatggcgaaaccccatctctactaaaaatatgaaaattagccaggcgtggtggtgcatgcctagagtcccagctacttgggaggctgaggcaggagtatcgcttgaacccgagaggcggaggtcgcagtgagccaagatcgtgccactgcactccagcctggcgacagagtgagactctgtctcaaaagaaataaaaaagaaaataaagcagtgaatgcgattaagatggatttattatgatcataaagtactcaggagtcttattttaaaagacagcattactgtaattaaaaatatagggaagaaactaatgctgttttgcgtatcattctcagctctctcaaaatcagatattaagctcttgctgccaaaggagactatactgcacggtgctcacctgcataaactttgagagggttgaattgtgccaagcaattctctcaatacataaattaaccaaatatttgttgacctactgtgtgacaagtattattccaggaaataagagatccagcaatgaaacaagtatggcttcttatagagttcccaaaaaggaaataaaaggatatacgtatagtgatatccctgaattaaatttctcttttgaaaataaaaattctatcataagctgtaactgccaacacttcaatactcattcagcagttttcagggatttgtaccttttgacttatgagaatttggaagtctaattgtatcattgcactggagtcttaaagaaacagataagcgaatgactttgcctgtatcattgttgactgtacttacaatcagaaaggggcacaggacagatgccagggagtaagtggacagcccataaatggaatggtaagaaagaagaactatagtggatttggaaagttcccttcagcattttccctagacaatctttggctgtgtttgcatgatcagtatttcattcacaggatattgagctcttgatatagttctcaaaacccaaaatgaaataagaagtctactctttatttaaattcaaattccagagagttaagtaactttccaggaggtaatctaaatatggcctccttgttggggggggggggggtgtttgaatttgcatataaatagtctcacccttaaaggaaaaccacagatggtggtaatgatgtagtcataatgtacatctccacagtggtggaacaaaatatccacagttttgctttccccagtttcagtgacccatggtcaactgctgtctgaaaataggtgactacaatacaataagatattttaagagagagaaagaaagatcacattcacatgattttcattacaatgtattgttataattgttctatttttattcatgatttttaatctcttaactgcgccaaatttataaattaaaatttatcacaagtacatatagtttatatagggctcagtactatctgcagtttcagacatccactgggagtcttggaatgtatcccctacagataaggggtaaaccactgtatcctatttgtgtgaatgctacaggtgttgtgagctcataacaatatgacatcaacactgaactaatccaggatttggtagtgagagtgatgtatttgcaaggagtgagacgtggtgcctcatccaagcagagaaataattttgaaatttgcctgacaataaaaatcacaatgtgaggtctctctttagagctgcaaagtccaattcagtgccccctagccacataagatactgagctcttaaaatgcggctagtactaattgagatgggcactgagtataacacacatgccagggtttgaatacttagaaccaaaaaggaagtaaatgctcatttattgcatgttaaaattatggttttattatagttgattaaataaaatatataattaaattgacttcattttgcttttaaaaatgtggctatgaaaaatttcaaattatatatgtgtgtgattacatatgtgtgttttcacatatgtaactgatgttacatgtgaaattgattgttacatgtgacatgtaaaacacgttacctaacacgtgcatatgtatgcaacacatatgtaacgtgttacatatataacacgttacatatgtattgttacatgtgtgcttgcattacacacatgcataatatgaaattacatgtaatttcaaattacatgtgtatattttgaaaattacaaattacgtattttgttatttttgctttacaaagtcaaatttaccctatttaataaagcatcatgagttttttataactagtaaactttgagacttttgtaggagaataaataatgcttattataaaaactgattggaaaagtgagctggagcagggagcggaggaaaaaggactagagatcacctttcttcccagctccgctcctctcccaaccttttttctttccattctctcatcccaattcaaaagtgcagagttcacagttggtgtgctgatttagaaaacagatatataaacagccttaaattttctccaggcttttacaatgaaaagaagttcaatatcaaaagtaacaatataatctgtggaaaggtatagggggctatgtttttgaggtagaaactataggtgctcctggccaagcatggtggttcaagcctgtaatcccagcactttgggaagctggggcgagagtattgcttgagcccagaagtttgagtctagcctggcctacagggtgaaactccacctctactaaaaatacacacacacacacacacacacacacacacacacacacacacacacaaaagccttgcgtggtggcgcttgctgatagtcccagctactcaggaggctgaggcgggaagattgcttgaacctgggagacagaggttgcagtgagctgagatagcaccactgcactccgacctgggtgacagagtaagactgtctcaaaaaaaaaagaaaagaaagaaagtataggcactccttatatgcagctgctcacacccctcctccttcacacccctcccccttcacacccctcccccttccccaaaatttgcaaggggaaaaatgtgtgtaattggcagtatttagtggcgtgcaaccgtgagtcatcagactgcacatcctcacttctgctagtggctcagtacccaacagcactcagtgaaaactaactcatttcaaaggtgaaaacaagtgagtttggccaccagggagtgttcaaaactgtcagtgctgaagcaaatgtggagggtgttctgtagtttgttcaggttgatatttgtggtccaacccctagctgaactactaattattaatatctgtcttgatggtgcctcaggagaaagcttctcaaagggaatcaatgttcaaattatagtaggtatcttggccatggaagttattgaattttagccaatacttgctactctttcatttatagtgtgagaatgcagtgtaatgaacctgactctcactgtcctgacttgcctttctcatcgcattcacaataagcacgtcaatacgtatacacatttcatatttctaaagtttactttatttccttattgtacatcgctgtgctgctgatggaagagaaaaggaaaaacactattgattgcaaaactgttttatctttggtggcttagattttttttgtatgatatgtaacgtcttgcatacctaaggcaacacgaagctaaatagatttgcatatagcatgtattttttccaattaaatgtttaattttgttcagagtatactggggacattttgaataatggagaaaagtacaaagaaaattcataattctaccacctatcagcacagtgaaattttatgaagaaacataattttcatgtaaatcatagtgaactcacggtaggttttatttaatacagtaattggagagctggtaggaagacaaaactggttcaaaagagaatacaagaaacaaatgcttctataatgagtgaatttttaaaaaagtattctggaataagattagtgaataagatactaaactcgttgataccctacagcctttggggttatatcctctactgggtaaaaagtcatttacatcatatcagttttctaaaatttgcattgaacttcatagcgttgtaacatgtgtgggcccaaattaatagtaaacagtaagagttgctttactctgaaaatattgaagctcttgtgagggtgtgaggagtttgttagaaaacaacgctaccattattttgaaacacacacgatcatcttttgttttacttctaagttttggataatttttcttaaattatcttattatcttatccattttcttaatttccttaaccttttaaatgtttctcctaggcacttttattgatttttggaatatagttgatatgtgctgaatttttatcatccagttttaattctactgaaaaatctaaaagatgttcatcaactactatatttcaaatgcatacatcccctttcatgctaaagaaactgtatgggaaacacagtctgacattttcaggacctggtatcattaaaagtcttgacactgttaaaattaaacaacgccttttttaaaatcaaaggatacaaaagggctgtgttggtcagaggatacaaaatttcagttagataggagacataagttcatgagatcttttgtacgacatagtgactataattaataataatatgttttcgaaaattactaagagagtcgattttaagtgttctcaccgcaaaaaaatagtatgtgaggtaatgcatatgttaattagctcattttagctagtccacatttttcaatacaatgtgttgtataatacgtgatatatacaacttatattttccaattccaataagtaaaaataaatgtaaattatttgaaataaataaaatgtgaagaacatccacttttcatatgaaaccatgagatattttctgttaaaagattaaatgtccaataaatttttgatgttaacagaaacaaaaatgtttaatatttaaatacatatttgcatgctattgaccccctgaagttcactgctgggctaagtgaaccaactatatcttaagtcaaaaatgctgaaattcttccccaaatcccaaagctcatgaaaacataaacagaaaatttccaaataattctacagggaaaataagacacactatttgatctgatcaaacaacgggatgattatggttaataatgagttacttgtacatttaaaaataactaaaggagtgtgattggattgtttgtaacacaaaggagaaatgcttgaagggatggataccccgttctccatgatgtgattattacccattgcctgcctgtgtcaaaacatctcatgtaccctacaaatatatactcctacgatgtacccacaaaaattaaaataaaaaagagagggacccgaagataagctaatatttaagctcatcatacttattaagataagcaatacataccgaaagtaatagcatttaaaaccagatgttgggggagggttctaacttgttcattaaaattcaaagtcacctgtcttgttttttcttttgtttttgtttttttttttttttttttgagatggagtctcgctctgtcaccccaggctggagtacagtggcgcgatcttggctcactgcaagctctgcctcccgggtttacgccattctcctgcctcagcctcccgagtagctggtactacaggcgctggctaccacgccccgctaatttttttgtatttttagtagagacggggtttcaccgtgttagccaggatggtctcgatctcctgacctcgtgatctgcccaccttggcctcccaaagtgctgggattacaggcgtgagccaccgtgccaggccacctgtcttgttttatcatgatcccgagagtatatatgtatgtgtacagctcatctaaaccctttttctttcaacatgatcaatagattgaacattggagatattttataagaaataatgaagacaactcaatcagcacatatatatattaaatgtggaatctataatgattgcgaagcctgaagcaaactaaatattcagtaataggttctttttttccatggtatatccatttgaatatataacataaatgccttacatttgttttaactatttaaggtttatgttgttagtgtgatgaaatggctggcaaaagtcagaaactcaggaaagtttcaggcttatatctggagcctggttttctttcttcaaggtagaacctctgtgaagtgaaaaattttttttatatctggagcaataatgtagaagcttaaatgtattatccaagttgtcataagcctattatttctttacattactgaagtgaaagacagcattaatggctaaatgccatacttggctataatttatattgtttaggactggaaatgagcctgaaatgtacatttttttccaaaatagttcatgtaatatttgaaacctgacaagtaacctgatgatttcatggaataccatcaaatataaatgtgaagttttaaagacacagggaaatactcagaataaaccccctaaccacaggccagcagaagaactagacttgagaaaatgaatgggaagatagatagtaacaaatgacttctttggcagccttatatatgcttagtcttatagactgttttatggatgctctgcactctatttccagcaagtatggcatttggaacaggaccacacgagacaaactatgagttcacatttcccacaactgcacagatagaaagagggaacaacagaatactccctttcttcttgaaacaataacttctgttgaagctcactggcttcttttcagctgtttctgctagctcctcctccgcctcttgacctctaaggcaatgctcttcaaaatttcaagactgctttctaattgaaacaaaacttataagcacatttcttcccacaaaatgtacatttatttgtaaatcatatatgaatatgactaagcatgtaaacgtatgtgaaaatagaaatcaataaatataaatgcaaacacaaatagaagcattcacagttttcttttgtgtcccagtgagttgttccaaattcctcggaggtaggtatgtcacagtttgagactataccttcaatcctagggtttctggtttcgctctcctcctaggtgatagcatccatttctacggacttaactgccatctttagttgaataactcctctatctttccatcccatatttctcttgattccaaacctgcttgttcacctgagcatatgacacaattcattggctgccgcacatgcagctttgacattttatttaaaatctttccccttccccagccctcatctatttcacagtagtatcttcttcttatctacttgattggtaagcagagtccacatgattccatcatttatctcccattttatatctaatctataagcaagtaatgcaatgcaacttctgtctccaaaaatttattttgaatttgccttctcttcctctgcatctcccccatcttaggccaggtcacctctgccctcttgccagattaggtcacattctcttactactgttgttattctcttcctattcaatcctacaccgcagcaaaatggatcttctcaaaatgtcagctagataaaggcatttctgtgcttaaggccctcatggatttatcttattaggatgaacacccaactctttattatggcttagaatacaatgaattacaacacataatgaatatattatatttctatctttaccattttcttcttaagtcaacctttctcaatccatataggataatcatattagtgcttcctcactttctaaaacatctcagggcctttgcacgtgtttctctgttcttagacccagaatgctcttccttttctctttgtgtagctaggtgcttctttccatttacgtatcacatgaaatgcagtcattccctcctccttccctcactacctcacaaaaagttgatgcctctgttaaaccatgaatggaattttactcggcagtgaatagaggaaaaaccaatggtaaaagcaaccatatgaatgaatgaatgtcaaaaatattatgctgagccaaaagtcatagacacaaatatgggtatttacatgaagttaaagcacagcaaaactcaattacggtaatagaattaagaaagtggttacctctgggtgagggttggaattgagtggacagaggcattagtgactttttcggggtaatggaaatgttgtctattttgttcaggtggtgaatacatagatacattcaattgtcaaaacacatccatccaaacacttagacttttgcactttattatatgcaaattatgcctcaactgaaaaaagtttgttttcaaaattatatcaacagttgaaattcttttaaagatttgattcaaatgagattaattctgtatccatcattgatgtatgatagttttgtatgtagttaaggttattggagataattgaaagttatactcacaagaaggctgcataatatgaagtttatctgccttgatctttaatagctttcgcgatttcaacttcttcacagctctgtaagaaggcagtgtggcatgttgaagcaagcatgtgttttagagtaacacagagctggtatacaaccccatgtctaccaattatcaatgatgtgggtatgttgctggatctcaataatcttccactgtgaaatggaatgtaacacctgactcacaacgcaaaggtatttaccttatgtaatataattcctgcgatcctgggacctcccttaatcccatccacagatgccaggttaaagaccccatcacagactagaacaagttgggatgtcaaaatgaataaatattaatcgaagggcctattgtgattgaacaccacgcagtaggcactctctaatacctaccgtctccctcctttttgggggaaacattctaaatgtgcaaaaaataaagggttatttgctttctggcacttgggatcgatttattgaggatatgttagcagaacagcaaaggtgaaacactaaaagcaccatcaatacacaggcagaggtgaagccataaagcctttattttttaaattaatgcacaatatataagaggtatgttagaatgaacgtccaatccctgaaaggatatacgaaagacattcataaaattacatgggcatgttttcttaatgttcaaaatattgttttaattagtgtattatgagtttattcatgtgtctgtgtgttgtgttatattaatcttttcttgcattgctataaagaaatacctgagactgggtaatggatgagaaaagacacttacttggctcacagttctgcaggctgtaccggaagcatagcagcatctccttctgtggaggcttcgggaagcttccagtcgtggcagaaggcagaacgggagcaggcacttcacctggctagagcaggagcaagagagacagaatgaagtaccacacacgtgtaaacagccagatctcagagaactcactcatcatcatgaggatggcaccaagaggatggtgttaaaccattcatgagaaatccacacacatgatccagtcacctcccaccaggccccacctccaacactgggaattacatttcaagatgagatttgggcggggacacatatccaaatgatatccatgtttaatcagaaaaataaaagttaacagtaacagtgattttactttgtagacctttgctaatggctgaaatctagctccattccgagaacagcctgcggtacacattttgaaagatagttgattaatatgaaagaagccttatctgtagtccttaaggccattatggtttacatatatgagtaaatattccaaagtagccatgccagttaacatatatccagagtctaaaggccactgggcgacaaaagtaaaagatacatagcaattgttactttatatcacagtaattcttgtatattttaaatggatatttgcatttgaggatatccacttaagagttaggtacatggctcttacatttaagtaacatttacttaaatttctggctgcagcaattccacataggtagaaatgaagtctgaattgagttgggggtctttgcagtgctctctctgttcattggctattttgacaatgctgagagatgtggttagccattctttttcatttcatattggcaacctagagagcaattaagccttctccccttaactagatgtatgttttactcatttctggatctttatggctgactttgaatcctagcctgtggtagaaagcatggtgtcagaaggaactatgagttaagactatgcatacttggctttgagtcttgggtatcatacctccctcatagagtgaaggaaccagggattcttcttgaggcccagacccggcatccatgttaagaatacctgtgcaattttgcttcctgatatttaaggtgaaaatgcatgtttgggtcattgtgaggattatgtgagatgttacttttaaatataggcccccttattatatgctctcatagtttcaggcaacacttgtcgtatttgtaacctcagttttaactgtaatgtttccatcaatgtccctcttacctggtacaggggctcttcatattcttggattacaaatctgtgaatgcaaccatgcatcaaaaatattcagaaaaacaatgaatgcctacctctgtactgatgatttataggtgtttttcttgtcattattccctaaacagtacaatgtaataagtatttatatagcatttacattgtattaagtattataagtaatctagagatgttttaaagtatataggaggatgtgtgtaggttgtatggaaatagtatgtcattttatatgtcacttgaacatttgtggatttgctatccgtggggatcctggaaccaatcccccatggatactgagggacaattgtattataagcagcaagagggaaaggaatctgtctattttgcccaaaatcgtgttcccgggacctagcatagctcctggcaaagagtatacaacaaatatgcattgaggagagaacagagggaaccattatccccttattctcgctgttccttcatgtaatgaataaacagtcaaatcttacaagagattttaaaccagtcagagaaaagttggaagttagttagttgttcatacattgagaagcctcgacgctgtgtcatctaggtaatgaaagatctagggaagtttagcagggagaagaagagagatgatagttgtcttcaaatgtttgaaggactgttacggacacaaaaatttaaacttgtgctgaataattccaagaggtacacagtctctcgatagaagctaaagtggggggtgacatttgactcaacaaaaagccatctaaatatcagaactttcaaaagcaggaactggtgcctcaattaatagtgtgttttctagcacttatgatacctgatcataggcaagataatgaaaaattgggacctgggagttatacatgggaatttgtttatcagttgggtgattaggagaggtggccttaaagtcctgttgtgttctaagagtctgtgattctgagtcttatttcccaacaagagaggtacagagcagaagatgggattgggagaaataggataaagataccaggaaatcctaaaggtaagaaaaggaaggcagacctgaagctaactctatacttcaggtgcttgcctagagccagccctacctacttagagaatgttgaagagccagttaaaacatctttaacacggatgtaaaacaaaactatcaaaacctgaagatttcgaatgttctaacctactcgtcagttgggcttttttcacaaatacttcagtaaataggcataaatttattttttaatgatagaaaatatctcttaaagaacttataactgtggataaaagcaccaccataaaaatcttgtggtgaaatatatatatatatatatatatatatatatatataaaattttaaatatggttagctagaatatgacgacaatgtttatgaaacacagagactcttgacaagtcccatgtatacactataaaactttaagttatccactattcactcactaagcttatacttaatgagtgtctgctgtgtcacttattgcggaaggcacaggcggtatagcattgcacaaaacatatgtggtctctgatggagtttttcagtctagtggtgaaagcagtgaatgggtgtacagatgttaaataattgtacaattagttgcatgtgtaaacgtcaaagttcagaagatgacaattgatctacggcaatgtttctcaatctctgacgttttgagccaaatacatctttgttgtggtggactgccctgtccactataggatgtttggcatcacaactgacctctgcccattagatgccaatagtactctcttctttaatcacaaatttgtcccagacatttccaaatgtcccttggggagcaaaatcatccctagttgaaaatcactggtctagggggaggtctttatgaggaagtaacatctaagaaagctggtatgtttacatatagctacagtctattacacatgtatacatatgtaacaagcctgcatgttgtgcacatgtaccctagaacttaaagtataataaaaaaaatgtaacaaaacaatacagtatgataagtgctatgggaccaaagatgaaagggttctactgcacagttatgaactcatagttaggcttttggggtcaaaattttgctgaagatatttgccacccacgtgacctttggcaggtgacttagcttattcatgcctcagttttatccaatgtgaaatggggctggaaagtcccatgtacttcctaataactttgcggaaataatatgtggttatataggaaaaaaaaaaaaatcctagaagtatgcctgctgcgtagtaaaaggaaggagaaggataaagagaaatctgcattttttcttctgtaatggggcagatagtaaatattttaagttttgtggcccaaatagtctctgtcacatttacttgattctgcagttgtggcattggaagcagctatggacaatacttaaattagtaggtgtgcctgtgctttcaataaaattttataaatacaaagtttgcaaaacaaagttgttttttttttttttgtagtttgctgacaccctagtaaagaagcaccattgtcaacgttaaaaattatcaaatttttatttttcaaagttttcaaatttgctttgcttggtctagctcatgaaataagtcaaaagtagcaagacctccacctctaaaataataatagtaatgataacctcaaaaggaaagaagaaatatttttaaagaagaaaaattattgttaaataggattattgtgcagagaaaacctaggagactcaattttaaaatctgtgaaataattttaaaaatactttatgaatagatacataatagcttttattcatattaatgactataaatgcaaatggaaatatttcattcacactgatgacaatgtataaattaaggaggaataaaaattgtagaccctataggtgaaaagcataaaaatatacataagaaaaagcaaaaattgactacgtaggattgttttaggatttaagatttattgtcattaaacttgcaataccagccaagttaacatttgaatttaatacagttataatcagaatgcttttgatgtgtttgggggcaatataatttcaaaggaaataggcaatgatgtaatttaaagtttatatagaaggaaattgtgtgcgtgtatgtgtgtgtataaattggaaacaattttattaataagcatattatggcagcaacatacacttccagatttctactatactttgaagtaattgtgatcaaaaccacagtgtgctggcataaggctagagaaatgggttagtggtttacaagtgagagtccaggaaaacatccaaataagattggatattttagttctgtgtggatagcctatttcacttaataaatagtgtctcgtaattgactattcatgtacctataagtttaactatagaccaaaaaaacgccctactagattaaggagctaactagaaatataaattcatataaacaataaaggaaagtgtaggactttataagcttcatgggagacagatttttggtaagtcaggaagcctggaagacttaaaacataaaattggcagactgaattaactgatagtttaaagcttccatagagcaaaataaatcataaaccaagttttaaaatatataatggatttagagaaggtatttacaaaaatatatgactaatggaggttaataataacaatatgtaagaaggatatgaaatggcattttactataaaggtcaaacaaatgacctataagcataataaatcatattaatctccactagtaataactacacacatctacataatatagatgttacgcctgcatttgatttactttatctgtcttttggcagaactatttgtcaccagataaaaaattctatatcattaccagaaaggtatattattataatgtttattatgttgcagttgtaaaagaaataacagcttttcaattgtttacaaatcctatagaacatttactgaaatacatttacattttgtggcaaacttggatttaaataccgtgttcgtgctttgttttatgccgttttcccatcttttctccaggaatttgattgtgcttcattgaaagctaaaaagaaaaaaaaaataattctggttttggtttaaaaaattaggttaggggttaaaaagttgtacgttgtcttctgtaaaaataaaaaacaagttttctttgtttcttggaggctttatattaaatggatttttaattcatagacagcatattgtgatgaaatttccccatgagcttcacattttgtttcaatagcagaaactaacttggttgcagttactgcccttctgagaacagtgttctggaataattttgacatacatatgtatctctttttaaaacatgtgttaatcttttcataaagaaagttttcccagctgtgtcacctgtgactccaactttctggggggacagggatatgagatgttggaagggaatggcttgaagaaataaagtgcaaaagacgtaatgctttcctgtggtagaaatgtattcagtgaccctgaatgaccttcctactcttgtcccttcatttttcccacaagtatggtctgggcaattataaaaattgacatttgcagtgggctcttctgtaaaagatgctcaatcagaaatgatttattttagaaaaagagatgatataaacatatatatcccctgtctcggaagtgtgaaggttgaaaagcaaggagatgatcttcaaagtgtctaaaatattgatttgtaacatcgttttatgaaagtgcttcagattattttttttcttggatggccccttatgctttggtcagttgatgctaaaatctgaacttctttattttaaaaaaaacttttaattttgaaaaaggaagttcacggtgctgtctaattctttttagatagtcattaatgtaaatgtaagagtcattctgagaaccacatctgctgatatgttccgttaaattacaagttctatgtgtatttgctttgctttcatacaatgaatcttctttactctcttccccacctgccagaaattgccccactcaacgttcataaaaggtccattttcaatcgctatatttatttcagaagcagagatatcatatattcaaattttagttactttccaatatcaagctaataactcacacaaataaatcaaactacagcaaaacagcaatctagcattcaacaaaacctccccaatgcacatatttcaagctgtagatatgtatcatccaccatgctgaaataatgtacatgttcaaatcaaatggaaaactagaatcaaaattgttgattacttcttatcagggcattttattatatttaagaaaaatacaaattaaatcattttcaggaagcaatccttctggctaagatttttttagcataatgcttaaagttaattgttgatctttatctataaattcaaaggtggactaaaaatgcagaatcaatcaggtagtccattttgcatcaggtgaaatatataaagcataaaacagcgagttacatttcctaacaaaattgaattacagtgagtaaaagtgacaggacaaatgcattaagaaaagatggactgaaatggatagagtagaatatatgcatctataaaacacagtcatatataatacactcattttttttcttacgagtgtgagattaatggaagaaaacaacaataataacaaaaccagtgtgatgtgtcagatttcaccttttaattaaaaaattattcacttcagaggggaattttctttcttgggttagctcaatcatgtcagatcttgttcatttaaaaggtcagtttacttgccttctgaggtttttgtttgggaaaaagaaaagaaaatagattttcattggtatcctgggtagaattaattgtttatcattcatttttaagatctccgagaggcagaaaaaggggaactgtgcaacccttttgtccttctggatctcaaaatgaagggatacattctgctacatgaaatgtggaattaagaccatgatgcaacatgataaacaacacaaatttgggggtgtctctgtgctatacattattgaatttttccatgctatacactttttggatgtgtctgtgctatttattcagtttttttaaataaaagtttttgtagactaaattgccctctctactttgcatcgtttttgaacaaaggattttcaagactgataagctcaaatgtatcatttattgtattcaagtagcattcaatttttctttagaagtataatttgtagatattttaacacagaaaacttgcaacactgctcatgataggcacttattatatattttttgaaagactatatggataatgattctaactttgacttttcctgttttgccttcactttagaattaagcagagaatcaaatccatattcctgggggcgatgcttggacaacagtatctctttaaagatctttgtgtgagtcgaaggtgcagccagactgggagttattgtgaagaaacagattcaggaaggttgagaaacttgcctaaggctaatcagatagttactggcaatgttgtttctaaatcactgtttggctccctcattcaatgaatctacactatgtgggactgcctcttgctcctgacatcttttgctgctgaaataaatgaactcaaagcctagaaggtagaaaagagggagttcagaattatattcaggcacaaataccaataaggctattgcccccagaactgcaacttctcttggtttaacagataactatttagctgtgaggtacaactgaggaagtggacacacaagttatcaggagattctgatgtgccagtttatatttcttgtcacaggtaatgattcgaaatttcttaaaacagctgtcctcacagtggagtaacctgggagtacatgaaggcattccaaggagtaggcacagatagttttaagggaatttatttctagatcttctactttattttgtactcttcctgaaaactgaattgcctgaaaaaaaaaaaaaaaaaaaaaagacatctgtagtcaagacctcaggctgtttctcctttctaaccacttgccttttctaaccacttctcccaatttaagaaaaaaagccttatatttcatccaactctgatcttactaaggcttcaaacaaaagaagcatgaatgactttcatgacagggcaacatagctttttgcaagaagagtggttgctaactctttgctttcaactgaacccgaagagaagacctgataagttgtcagccgatagatcattaaaaatacgttttggtaagcaatcatcatgtacttttagcatatgccatagcaggagcacaaatgattaagcaatgctactataatacaattccttccgtttctttctactcacctatttgaataagatttttcatcatttacatctatacagacaaaaattagggatagaattgatgctgaagcctttccaattgtagaattaatttatattcttctgaaggtgtataaattgttaaatacccatccatcttattaagagatgtattttcaataaaattttatttttatgtttatcaaattttataatatacatatattgttttggtcaattgcacgttaataattgtaacaatacctcaattgaaaaggtttgttttttacatttaggacttacagtaacagaaaaaaaacactcattgtgtatacatactgtttaagaaaagtatactaggtgatcaataagattttttcaggcataaacatatatcttagttttaagatatcgatatttacaatgtccctcaaattatattattttcagtcatttaagaatgaaaagtacatttcgaatgcggattttaaatctgcaagggttgactcatttttcaagagtctttttaggggatacagaagcaagaatgtttggagttccctgatcagtatctttaagagaaggtatttgttggtagttcctagcaaattccaacagcctgatgctacttaaaagataatagtaattattttaaataatgcttctgataaaaaacattcatgcacactcagtttaaaaagatatttaaacatttgtagttgtagtttgggaactcatgatacaagtacagtctgtaaatgaagctcttagtttgcaaatatcagagataagctattaaaatgcagaaattgaaattgccctgatatatgcataaattagtgtcatctccatcttgtcagttagagtattttttagattctctctatgtatacatacatatatatatatatatatttatatatatatatatatttgtgtagctgtgcatgtgtgtatttggactaatgggtcaaaggacagtactaacccaattcaataattaaagaaaacataattttgagaattagctttatggtaattgtttgacttaaatgagtagatcagagaagaataagggctttcccttatttaaacaagcttcatttttttatccaaacatttacttagctgattaagcttcacttgtttattttcttcaaagcattcattcaggtgggtactgagtaaactgaaatatcacaccagggaacttcaacaccatccaagtcttaaaggcttcacttgttcacagttggcatttagtgaatgtctaggctactgataatattgtgagtaagttggcagggatcataagaaatgataaaatacagttcttgaaaatgttatggtttgaggaaaagatctatgtttggaattagactgacttggattcaaactctggctgtacctttgggacaaggtgttcagaaactctagcctatgttttttttctgcaaaatgatcctcttttccaggattcctgtagagattcaaagatatgtgaatgtttagaaaaagaatagacttttgatcattgttaattcccttactttccccaattagacttgtaagactgggaagaaagctacacaaaagattgaacaaattatagctgacagaccatagcaaaagatacagggcaaaacttaaaggggaaaactacacattaaattattttaaaccattaaatagcactaacttttgtcagatattacaaccaaacaccactcaaattaaagtaaactgaataaaatgcctgtttttttctgtttactgatgttttcatttgcttcattcatttattggaagatataaaatgtgttagacactgttaggtgctgagtgtataaaaaaatcttattaatacaatttaaacacgcacacacatatatatggttataacaattgatgccatgtatgtactgtttatatgcctatacattattccacagacctggggggagggggatgtagagtcttaccagaaccataggaatcttctcacatcaacatttccttttgaagtttgttcatgaggcaccatccagataatactaccatctgcaatgtggcttgagaagatgttagatttttttattacacataataaggctgtaaagtatttctgtatttaggtagaggtatgtaatacaatatgtatataaaattacatatccaataaaatctggtgttaaataaggactagcttctatgataatatagtctaaaggcttttcatttggtgttatagaaattatgtgaaatatgtttcctggagtagaattattcgcatttcagctctctgacagtggaagaaaagctagagggagaggtgaacaagagagggagcataatggacaaagctttgctggaagccaaaccaccacttcatatgtcaaatctgacaggcctcccattttaggtgtgctgtcattgaagctttcagctgcaccttgcctgtggctaggctattttcaaagattaaaatgcgaaactggaaattaaatgcaacttaattcccaatttaaatttccattatttttgaaaagtaaaagattaaaagaaatgtataattgcaattctggtggaagaggtaattataggaaaggtgggatgtatttcaagtgggggatatagcttactgcagcagagaggaatctaagctatcattcttttgaaattggtctggaaatatgttttcacatggaaaatatactatatttttaggaatttccttgtcatattactgtatccttttctgttagaatataaattctgaattccctattccactgtagatctgcctccgattatattagctcttctgaagttatcaaaaaataatgagatatacaatattccatatatgtcaaagcaattatttttaggttaagtaataaaccaatgacctttaacccggtaatattctgggttgttcataaaaaaactatattcaggtaataatgtctttccacttaagcaactgaaaaaatacacaatacttaacatttggttaattaaatacctactccagacaaaaggattttctgttttcaagttatcttagcaagctgagcaggaagcaatgatatatccaatcagaatatccatggaagctctgctacagtttcaaaaagttctcatcaggcagcttttaaaatgcctactctgaaaatggtccaggttaaagaacaacagcttcctcgtcagatagcagtattgcttggccatgtttcttcctagcacaaaaaagtacctgctcttctctgagtacctacattctaaggactatggcttacataaaacagcatgggttggggcaatttccagcacactgctcactctcgaaaacgtatgatgcaggtgagagtaatgtttttgtttgaatctgctttcactcgtggaagatgaaactacttgcaaagatctgtactttagctattatgagtaacaaaagactcctaaaatattgcacacattgtggggatggagaaccatcatcctgggatttgatggatcctatggtttggctttgtgtccccacccaaatctcattttgaattgtaatccccacaatccccacatgtcaagggagagagaccaggtggaggtaactgaatcatgggagcaatttctcccatgctgttctcctgatagtgagtgagttctcacaagatctgattgttttataaggggctcttcctgcttcactgggcacttcttcctgccacctgtgaagaaggtggcttgctccttctcaccttatgccacgatggtaagtttcctgaggcctccccagccatgctgaactgtgtgtcaattaaacctctttcttttataaattacccagtctcaggcagttctttatagcagtatgaaaatggactaatagagacgtgtctctcagaagtcacagtgatgcttgaacggatccagagctccttcttcaggaaggtcccaactcattctgaagggtctctccaagcccacctctctctgtaaatgggaaaggttttactttgagcactaaaacctgccagaattctcaattttcctaacagtgtgttaataaacacctactcatttagtatccaaaccaggtctgtatttctcaattagagctcaccaggctttcatcataaagtagagcttcaaattgtctgcaatcccactcctatcaaaaacctagaaggaggtaatatttcagagtaatactataaccagatgaccacatctaagaaactgctgaccctacgatgtaaccttctgtccatttttccctttggaaagtctaggatcttttcttataccagcaagttacaagcctggactacactaacttgctttccgcagaagaaaacaccatgagttctgttttcatattaagcacttagtctccatcagacatcaatcgagaaaaaatcattaaaaatcacattttatatttgatgtatatttctcaataatcctatgtattagttcattttcctactgctatgaagaaatacccaagactgggtaatttataagtaaaaagaggcttaatggactcacagtctcacatgactagggaggcctcacaatcatggtggaaggtgaaggggtagcaaaggcatggcttacatggtggcaggcaagagcgtgtgcaggaaaattgccctttataaaaccatcagatctcctgagacttattcactgccataaggacagcacaagtatttagctccctcagcacagaaccatccccgtgattcaattacctcccaccaggtcactcccatgacacatggggattatgggagctacaattcaagatgagatttggatggggacacagccaaaccatatcatcctatttggatgatcaatattatcaaggtatgctcccctgagggggcgtcctttttaccatttaactccaggacaaaagtttatttctttgtaaggacagtgtttatttcttatggtcctattttctcctaagatccagacaccaaaatggccatctatcattgacttaactcctgaattttgcttagagtaacagatttagtgaatctaaatattttctggctgtggaatgttaatttatacatgttcaagttacctttgattcatgtgacagtttgtgccaaaacacactcattatcagaactcagatcattatgttggctcttgttttcgttactaaaggaagaaaaacagtttctcaaaaagaaaattctgatacctaggaagaccattatacctcactcttttctttatctcatcaccacatccaatattataaaagaacttacaaagtaaaaagaaaggtgttctgtagatgtagcgcctggcttgtatggtagcttaaatgaacacagctaaaaatattttatggctagtgtccaaaacagtctggcaccagacaaaataagaatatttaaaattatattttagagttactttaagaggaagggagagagagatgtaggcaggaggaggaggagcaggaggagagggagagagagagagagagagagagagagagagagagagagagaatctggggtttctatggaagggctaagaatatgtagaaaacagtttacaaagaaatatggtccaagaatcgtgtgtacacacacacacacacacacacacacacacacaccccctggaatatttttcagccttaaaaagaagaagatctgtcatttgtcccaacatggatggacctggaggaccttatgctaaatgaaataagccagaccaagaaagaaaaatattgtatgatctcacttatatatggaatctttttttaaaaaaggtcaaatatatacagatagtgaattaaacagtggttaccagggtcagggtagttgtgaggaaatggggcaatgtaggtcataggatacaaatgattaaaatatattaatatattaaaagatataatatacatcatgaggactacagttaataatagtgtgtattcaagatttttgataaatgaatagattatagctgttcttgccacagagtgaaaaatgggtaactgtgaaatgatagatatgataatgttctccacaatggtaactattttacactatatatataaatatctatgcatcttacaccattatgtggtatcccttaaatatatacaataaaatttattttacaaacacatattaggaatgcatattctgatttttaacaatagttaacctcattaatatatttcacactatcatttctagtgtacatgaaaagtagtttattgacattagttgtaaaaaaaaaaaaaatggtcttgagacttttgggtcagagaatgttctggccataaggtaggtttctgcttgcctactagatatcttaacttcgatttcctgaacatcccatcacttcagaatctctcaatcctttctaacatccgcaacattgtttttctttctgcatttcttatattgactgatggatttataattcactttctctgaaaaaccctgcagttatcatatatccctatccattctggctctttattgcccaaatctctaccaaaatcctgtcagcacagcctctgaaatatttctcaaagcatttataatctggctctcatcaacattttcaacactctgttttatcattccactattttacatcatttcattttcatttttaccacaatcactcatccaacaaataagtatttagctccctcagtaattagtattattattattaattataactagatgctgagcatacagaagtgaacatgacagacataatcccagcagggatgtcagactttatgcaagtaatcaaccatgatgaatctcatgagattctgagagagagagagagagattgagagagagagagaaaggggaaccactggtgtccgagttagaaatttgaattagtatctgggtcaccaaaagcttctgtgaagaagtgatatagacttggccacacaaaactaccgtgaaggtggtggaaatttttctatgcagagtaccacatttaaagagctaagcctgagagtgtcagagataaaggaacagaaagaatgtgacagcagattatgtttggaagaaagatgttcaagagaccaagctaaagaggagatggggctagaacctggagggtccttcgggtcctgttgggagttttttctctgcccagaagggctttgtcacgtggttgtcaggaaagagtcatgattagagctttgattcagagacttctttcgctgaagtgtggagaatggttcagagagaagcaaatctgaatggacaaaagaggttattattgtaatcttggcaagaagcgatggtggtcttgactaaaatagttctagtgagaatgtgacaacaaacctgagaaaaatacaggagacgtaattgacgggggttagtgttaagttgaacgattgcagagttgaatttgaggaaagtgtcatatatcattcccagtttctgatgtcatacacctctggagataacactgccatttcttttgaaatgggaaaataataagtgatcagtaagtacgtattggataaaataatgaatggttaaatgcataaggggagaggaaaagagttgcagagaaagagagtaaacgtattttggatgtgttaattttgagatacctttgaaaaatccaagtgaggggttgggtagtcagagaaatgaatgtggatgtcaggacgaaaggtgaccgtgatgaactgtatgtcttcctctaagcacgttatacagcttcatgtcacaagtgactcacttcatgtcacaagtgactcacaaggtcacttgtgacaagcatttgcctggtgcttcatccctaacctccctttctatactcagctaaaatgtcacctacaatacttcttccttgactccaccgtccccactttactgatatgaatacattttaataaaatgatataataatgcttagtttgtaaacctaatgttcctcaagtggtataattatctgatttgtatgtgatcatcaacccaaccatattaggagcaccttgaaggtagaagatttaggttcatgcttaacaccacatctggaccactgtggatttaactttctacaatgattgtattcattaatatattgggtgcccactatattccaagtaatatcctgcacactacgtacaaggaagcataggtcccgtgtgctcatgaaactgtaattttagtaagcagggataggatacaaactgagaaaggaaaacaatttagaaagtgggaaatattatgcacagaattaataaaaaagagaaaaatcttgaaaaagtcttcaatacctcacttggaaggtgattttgaagaagaactgatggacaaactagagtcagccatgtaatgatgtaggggcaaagcattccgggcacaagggacagcttatgcaaagaccttaaaaatgaactagctttgtatgttggagaaggataaagagaactaaggtatctataaggtaattaggaagaggatgagttatttagtcccttagtctttgaagcacattatctcatacttcaattgagtttattcttagtgtcattcttctggatgcaatatttgagataaatgtcttaatgaacgttcacctccctccgtagtaatgcctgagtgtcacaaaaactttttttgtttacatacgtagccatctaatggaaacataaaataggaatcaaaagttgagtttcatgtacaaaaggtaaggactgtacatgtggtcataacaacttcaaaagcacctgaaggtaacctttaaggaagatacaaaggctaggaaatatctaggatccatgaagacagacttacttaaggtcatagtgtgtccagagttggttcccgccggtgggttcgtggtctcgctgacttcaagaacgaagccacggacctctgcggtgactgttacagctcttaaaggtggcacgaacccaaacagcgagcagcagcaagatttattgtgaagagcaaaagaacaaagcttccacaacgtggaaggggacccaagcaggttgccgctgctggcttgggtggccagcttttattcccttactgtcccctcccatgttccatttctgtcctatcagagtgcccttttttcaatcctccccacgattggctacttttagaatcctactgattggtgcattttacagagcgctgattggtgcgttttacaatcctcttgtaagacgggaaggttcctgattggtgcgttttacaatcctcttgtaagacagaaaagttccccaagtccccactcgacccagaaagtccagctggcctcacctctcaatagcattaagaatatagtttcacgagcatatatgaatcaaaacttacatttgccaattttatttgcttgtttatgtgtttccaacatgtcttgtcttagggccaaatgtttccctagagaataactattccaactatcttagttgctgtatttttatgcaaccttcaactctccatactaaaatgtctccagaatagaaaataaatcttttcaaagtttcaaaagaggctctctatatattccccttaaaagtaccaggcagacatatttctaggtttctaacattgcgtgttgccaggaagtatatccaaaccatcacaagttattcatgtaaccaagcacacttattggagtgcttctgcttctgttcttgcttgaaattggaagctccttccaggaaaaaaaaaaaatatctatagaaggggaaaaaagtaattttactttgaaaataaaatatacgtgagcaatagttttattctgtttttaatttaccatagcttccaaagacaacattgttttatagtaggggttagcaagtgttttctgtaatgtaaacgtaaagggccagagagtaaatattttaggctttgttttctatactctgttgcaactattcaactctgctgttagaatgttgaagcagtcatagacaatagagaaatgaagatgtgtcattgtgatccaataaaactttatttacaaaaatggcaatgggctagttacggcttgagggctgcagtttgcagactctcacttcagagctaacagttgttgtcaggagtcacttgtttttggaaacctacaatgaggtactataacaccaaaaagagttatcccttcctttttctctctcactttttgaattatgagaagaattagaaatgtagttaatgataatgtccaaccagtgtaattatacttgttagaaacacagctggaagcctgttgtccagtcttatttctcctctgtgatcctcattttcagaggttgaagtcataagtttgccatgtctactttctgacaggggaattataataatgtggagtcaccttttgtttgtgactttgacaatgcttcattgacttactcaccaattttctaatttttatgaagactttttgccgaaatgtagactcagtcttctctcttgtctactctttctataacaattaacaatgaacttatttacctttttaacatctttttaaaaattttctatacaccttgaaaatgtgaatacaaagtaatgctgcatcatgtatattgccttattcacacatagcctcttatggtatatcatataaaaatggaacaatacagcaacaggttgaatgaacagtaatcaggtaacaggaaaatgagatgtctttaatatttcacttaaaaactcaatttcctaaagcatacatataaatatttggaagtatagttagaagaaaaatatctttaaaatattttaattgattagtcttatttataagataatttttaggaggctggttgcggtggctcacacctgtaatcccagcactttgggaggccgaggtgggcagatcatgaggtcaggaaatcgagaccatcctggctaacacggtgaaactccgtctctactaaaaatacaaaaattagccgtgcatggcagcgcatgcctgtaatcccagctactcgggaggctgaggcaggagaatcacttgaacctgggaggcggaggttgcagtgagccgagatcgcgccactgcactccagcctggtgacagagctagactccgtctcaataataatcataatcataataataatttttaggaagcatcagaaatatataagaaaaagattattttcttaattgctttactaaaaacacctctatgatttttcagtaaaacttgattcttatgtcatgtgtgagtgtgatctgcctctcttgggatactactgtactcatgaggagtgatttttttctccaacgacctctttgtcacgtcaacaggtcacaggaatagtgtaccctaaaaagccacctgccacatgctgctgaaaatgtaaaagtacacacatacacacacacacacacacacacacacacacacacacacaccaaaatcaggtatcacaagctgaaaataaaattgagtccaatttttttttaattgagcagttaatgtccttaaaacaaaatcctatactgcaacaaatacttagccagatcattctgatacctccaaactgtggtgtattccaagatacctctatgatctttgatttgatccacagcttttcagttatcatgcaaataccttcaagttttatctcatttctcagtgcaaactcattaaaaattttcagctgaattcaattttataaacatgttgtgaatgtcctctttatataagcaaggttgtaaggaactggccacataaacagaaaattgaataacatatggtttctggccttagtgatctcatgtgtgagttaggcatatgggcaaaatcagaacactatagagtataagtctaaaatggtagtattttataatagaggatgaagagggtgctgtgggatcataggtgacagatataactcccgttgtgggacttgagaaaggcttcacagtctggaaacatttagttgctattgaacacaaaataagactcactgttgagagaagggagagggagggcatttcaatcaaattaagattctgtggcatattcggaaactgatgtttttaaaaagagtaatgtttattacattcctctacataaattatatttctatgtaatatgaatgacaaatatttaacacaaaatgccttataacatttgaatgaaatccatcatatgacctgttatctatttccatttcctttttgctcatatcattatgaacaatgacctgataaattttttataagactttgctgaattagtaaaggattattaagtttagaatgaacaaagctgaccaatcattcaggcaaatttgaccgttttgttgtcgcttttcttatttctgaaaccatacaattccctgaaatgaataagtacatatttgataacttcctaaattaaggctcaaaacactggtaatctactgggctttcatttgttccttctatttgtctaatcctatctatatttctttatatgagctatgaaaatattagatttattaagttgtcctttatcttaatagagaagaatgtttttctatgacattaagaggaatttgatttttttctttaatgatctacttttaattttggtagagtagcattgataagatcaatattacacattgttaagtatgcattacatgttgataagataaatattacacttaaaatatgtttatcaaatgtatgaatgataaaaacgaattctgaaatgtatgggaaagatcttgaataaaggtctatgtacatttcaaggatgtctacatatgcaaattatcataatataataactattgaatatgattatcttcacatactttctttatttttcatctcttagatgaaattgggtattgttttcttatagctggaacaaagcattacagagaattcttagtgtgatttcattgaaactcactgttatatgagttcaacaaagtttaaattagtccatgacttaatcatcctttataaatcctatcactagtattcggtaaggacaaagtcaattaaaaaattagcaacagaagcattaaaagaaggattaataaatacaaaataagggatgtgatatctttacgtattgctgagatgttagtgctaaggaaaaacttccctgttcataatgtgaggtgggaaaaagaagaactattattgtatatttctcctctctaaaactgcctatctgactgtgtttttctgtgtcagccgtattaacagatgtttaattttactcactttagtatataaggcatcataatgtatgaactatttcaaaggccctatgatggctaattaaataaaaatatattaaatattagctggacaaaataaaatatgtattaattttggaaaaagtagatcaaggttttgcagatcttttcatatcaatatattcatttgctgaataagcttttattgtttaccaatattactagttttatagagatgtagatatcaccacagtatgactaattttatagggacacagatagatagatgttattttattccaatcttatttttacatataacaggtataaatatgcgcttgaaaggagtatatcacttaggagtcagtcagaaaagtaaagatcttctagtctaatacagtggttctcagccaggggtgattctgctgcacgctgagggataaattggcaatttctggagacatttttggttgtgacaattgcaggagtgttactggtattcatttggtagagacagagatattggtagacactgtacaggacacaggaaagtctcttacaacaaagaattattctgtccaaaatgtcagttgtggtgaggttgggaaacactggtctggaagaaggaatttactatgaggaactagttacgaaagtatagagacatttaacaagctgaacaaaggatagtgagatggctcagagattagcaactgtggcatgaagccactactacgtttaggtaaaaataagctaccatttattcttatagtaataataataataattattattattattatttgagatggagtttcgctctgttgcccgggttggagtacaatggtacaatctcgactcacttcaacctctgcctcccagattcaagcgattctcctgcctcagcctcctgaatagctgggattacaggtgtgcaccacccctcccagttaattttttgtatttttggtagaaacggggtttcaccatgttggtcaggctggtctcgaactcctgacctcagatgatccatccacctcagcctcccaaagtgctgggattacaggcatgagccaccacacctggcccactctttcttttttaattattgagaaatataaaaatatgtcaaaagtaacaggtgtggtggagttacagcatgcacataatgggatacagcccattatctaatctcagatggaaactagaaaaaaaagagaagatctttgctaaagcacagattatgtggaaaatcatttagaaaaatagcttatcacaacattaaaattaaatcctttagctgatcatttttccttgctattttttcttttaaaattgagaagacagtgagttttttttctttattgtcattatcttgatgtcaaaaaataatatgcacattataagtgggaaaaaagataagtcgaaatgaaatgaaacaatgcgaggaaaaaaatgtcacaacactcttcaattagaaaaaatgacccccatctttcctccaaatagaaatgacgtaactgaagtagtggaactttctcttccatggcaactctagagaaggggtagatggcatgggattgtggacagatggacacagaaagaggcctcatttattgttattgttaaaacttttacttctagtaatagtgacacctccttcagcatttctttatcaattgtcaatattttttggatcaccagcatcaccttctatatgtatgtctagaaacctcctgttatgaatttacacttctcagagtcaagacagaaatgctgtgaattgggcgataaataaaataccccccttttattgccttgctttgtctcttaaagaaagatgcctgttgggggactatgagaatgctttgtgcttctggacctcaagggacaaatctataataaaaattatgcatagtgatgagaaatatatataatgcaagtttgtagagatcagttaacttatcttgtctaggcaattatttctaaacaatgatttcaaatcattaactataatatagcccattcataccctccatttttgtcaaatccctgtcaccttcaaggacttggccatcccataggctgctctgcttttaatagaggaagatgctgtaactcttggtaccattgccagttatgaatttatccattaatgaacattgcatttaaggcataggtttatctccttctccaggtatgaacctgcaggattcctacctgaagcttaagggagaataaatccacctgggacaatcaaggacagatcaaccaatcagctcaaagcaggtgtgaattacacagtttatttgagtgacaaggtagctaaagcagggataataaaagaagggagtgggttgatgtggacagacgaactatggctttaggaaatttggtagggactgaaacatattttgtgtaatttatgtgggtctaatagcttttgaaacttgtttacaagacctgtgtaagtggtactggcatattcatgcatgagaaaacatcaagggaaaacttaatagttcaaggaggtgacaaagaagagaggaaccaattattttcactagccgtcaaaagcaagaaaataatcagcttgagcccttcggggaaaagataggttaaatattaagtaacagtttgttattattccaagtgttttcttaaagttgctcccatactttcctgttttctctgagggaatttagtttttttgttggtttttttttttttttttttataactgtcattggtcagagcttgatttgatgccagtcaaatttttttaaagagattatgaaaactgcttaaactcttccaaagggaagatgggtcattcttaacatgtgtttcaagaggaagagcataagagcattatatggtaaggctgaaagcagatatcagcgtttaggggccatgaagaggtagagctcacattggtaggatcattgactagaattccagagatcaaaattgtatgttagtctagcattggggaggacttgtagctagtatcttcattctagcttgggagcctaggaatcaggttaggcatcttgcacaggaatgggccgatgggctaaaatctccttgagagagatgattaatccaggacaaaccaagcagtcatgccaatgaattactttaacagggtacttcatatcctcatcctttgggcagcacggtcttcagagatggggcaggccccaggctgcagttgagattctataaactaaggtcaaaaagatgcagcagtgaagaagtcatgcttatcttgtataaatcatgttttcttttctttttaatgaaaatgtacatttaacacattttaaaactaaatattgaccctaaaattccaaccaaaaaatgctacataagtggtatttatttttgaatttccctcatgctcctcccactgtggggacaaggagtggtggtggaagagagatcttttagcaaacctgtgagtagagaattagaaggtaatgggaggaaggtaaaaggaaaacatcatagatggataggctcacaaacattaaaggccttcgtgcctgtccttcatgcctattcatccctctccagtatgtgaatcaatgtacttgttaaatattcattcacctcacatatttagcattaaccgtgtatcagggacgttgttagaccgttggtttacgatgatgtgtaaaatatcatttgtaactcagactaactggaagtgctcaatataataagatgtaatgttatggaacactaagtctgtgctgaagacttatctcctttaatcctaaaacaatcctggtgggtagtctcaatgatcatctccaagtcacagttgaggaaattaaggcttcaagaagttaagaaactggaccaacatcacaaaggtagcatcagagtgacagtttgatttcaaagtgtacttgacttcaaggcccacatttccttgcacgtttaatattgcctttctcaggtaaatataccattaaatgtgatacaactctaagcatttgaattacttacaacgtgcagagttaaaaccagcattatttacactatacttcagctcgtttataagtgaactattattttgtggactaacctatgaaatgtaaccacattgaattcctctgttaggtacaggtttggtgattccagggaatagagtatgactgaatgcacaggtaggggtgaagtgaacccggtcagaaaatttagagagcatcgagcagatcattaagcagctgtctttcaaatgtgcagaacacaactcatttgtaatctagggactatctgtattgattcttcccagggaagttacttatttttatacatatgtggtgtgttctgtccataataccattctacatggtaatgctcaactttattatttaaaaaaactgctaataatgaggtttttctttgtatcacagaagcagcaggagcaagttttctttttccttcccagtttttttaagtactgccaaggaatgtgattttgtcagacttgtatttcctattaagccaatctgcatgactgttccttctactagctttacctgttcactcatttattaattcatcaaatatttgtagagtgactattgtgtgccacatactaatataggcacaaggataaccaaaaacagacaaacgctgtcctttcaaggagctcatatagtaatgggaagttaggaaaggagaaaataaatatgtggtatttcaaatggaagtattaaagtgttaagaagaaaagagaaactaacaagatagggaaaaagtgacaggaacatgatgttttattttttatttatatatattttttgagacagggtctcattctgttgcctaagctggtgtgcagtgacgtgatcatggctcactgcagccttgacctccctgggctcagatgatcctcccacatcagcctcccaagtagccaggtctacaggcatgtaccacgatacccagctaacacgttttcttttcttatagagacagagtctcactgtgttgcccaggctgttcttgaactccggggctcaagcagtccacccacatctacctcctaaggtgctggaattacaggcatgaaccaccatgcccagccgaaattgatgttttatatatggcagtctgggcagacctctttgatgtgatatttgaacagaaatctcaagagagggagtgtattagcccgttttcataccgctagaaagaactgcccgagattgggtaatttataaaggaaagaggtttaattgactcacagttcaatatggctggggaggcctcaggaaacttaaaatcatggcagaaaatgaaggggaagcgaggcaccttcttcacaaggtggcaggaaggagaagtactgaggaaagggggaagagacccttataaaaccatcagattttgggagaattcactcactatcatgagaacagcatgggggaagccaaccccatgattcaattacctccacatagcctctcctttgacacctggggattatggggattataaggattacaattcaagatgagatttgggtggggacacaaagcccaaacatatcattttgctcctggcccctcccaaatctcatgtccctttcacatttcaaaaccaatcatgccttgacaacagtactccaaagtattaattcatttcagcattaacccaaaagtccaagtccaaagtctcatctgagacaaggcaagtctgttctgcctgtgagcctgtaaaatcaaaagcaagttagttacttcctagataaaatggaagcacaggcactgggtaaatatacccattacaaatgggagaaattagccaaaatgaaggggctacaggccccaagccagtccaaaatctatcagggcagtcaaatcttacagctctgaagttgtctcctttgactccatttctcacatccaggtaacactgatgcaagaggtgggttcccatggtcttggtaagctccacccctgtgggtttgcagggtagagcccctctcctggctgcttttacaggctggcattgagtgtctgcagcttttccaggcacgtggtgcaagctgttgatcgctctaccattgtggggtctggtggacagtggccctcttctcatagctccgctaggcagtgccccagtggggactctgtgttggggctccaaccccacatttcccttccacactgtcctagccgaggttctccatgaggtcttcattcctgcagcagacttctgcctggacatccaggagtttccatacatcctctgaaatctaggcagaggttcccaaacttcaattcttgaattctgtgtatccacagactcaacaccacgtggcagttgccaaagcttgggacttgctccctctgaagcaatggtccgaactgtaccttggccccttttatccatggctggagtggctgggacacaaggcaccaagtcctgatgccgcacacagtggtggggttgggggggggacctggtccacgaaaccatttttgcctcctagacctctgggtctgtgatgggaggagccgcaatgaaggtctctgacttgccctggagacattttccccattgtcttgcctattaacattgggctccttgttaaatatgcaaatttctacagccagcctctccagaaaatgggtttttcttttctactgcattgtcaggttgcaaatttttcaaacttttatgctctgtgacctcttgaatgctttgctgcttagaaatttcttctgtcagataccttaaatcatctctcaagttcaaagttccacagatctctaggtcagggtcaaaatgatgccagtctctttgttagtcatagcaagaatgacctttactccagttaccaataagttcttcatctccatctgagaccacctctgcctggacttcagtgttcgtatcactatcagcattttggtcaaaaccattcaacaagtctctaggaagttccaaacttttccacattttcctgtcttcttctgagcctcctaactgttccaacccctgcctattacccagttctaaagttgcttccacattttcaagtatctttatagcagtacctcactacctcagtaccactggtcttaactcctgcgctcaagcgatctgcttgcctccacccctaaagtgctgaaattacagacatggtccattgtgccgagccaaaattgatattttatgtatgacactctgggcagacctctatgaggtgacatttgaacagaaatctcaaggaaggggagaaattatccatttacatatttggggaaagagcattccaggtagaagaaacagaaaatccgtagtcttgaggaatgccgtgtatatgcagtatttttcaaacttgttattttgaaatacatatacacttacaggaagttgcaaaagtattaagaaagatcatgagtacccttcactcatcttcagctaatggttacatcttacataattatatgtaatatcaaagccaggaaaccaggaaattgatgttgatacaatctatgctttattcagatctcacatcttacatagctatgcacaatataaaaaccaggaaattgatattaacacaatctatgccttattcagatctcaccagcttttacatgcacttatctgtgtctgtcattctatgcaattttataccatgtttagagtcatataacaactacccctattttgatacatggtactgaatagttccagcgtcacaaaggaactatctcaagccaccctttaattgtcacacccatccaatctcccattctacttcctgaatcactagcaacccctaatctgttctccatctctatgattttgtcttttcaagggagttttctaagtaaactcatttggggaaagaaaggagatgaattgttctagccacggagtggagaacagagagtaagagtacctattgaagcagagggagtcattgcaataattcaaatgagaaataatggtgattctaaaccaggaagctttcagtgaaaacaatgagaggtacatggattctgggtatttttggaaggtagcactaccaggtttgctgatgaatggggtatggggtgggaaagaaagagaagagcccaggatgagtccaaggtggataaggtgaatagaattgagaaaatggtagaaggatcaagttagatggtagaggggtaaaggtggaagcaataattttgttttggaattgttaggtttgaaatcttgttagacatcccagtaaagtcacaaagagtgcagttggatgaaagtatgggattcagggaagaagtatgtgctagagatgcagatttgagagtcatctgtgtggaggtattattcaaattcaagtccccttggaatgaatggctattcaggcagggtcttcataaaaatgcttgttgcatgcctgtaatcccagcactttgggagtctgaggtgggtggaacacttgaggtcaggagtttgagaccagcctgatcaacttggtgaacccccatctctactaaaaatacaaaaaaaaaaaaagttagctgggcgttgtggcacatgcctgtaatcccaggtacttgggaggctgaggcaggagaattgagccaagattgtgccattgcattccagcctgggcaacaagagcaaaactccgcctcaaaaaaaaaaaaaaaaaaaaaaaaaagcttgttgcttcaaattcatgtcagtctgtaaaattatctgggaaggcagtacaaaaactgtcactttgactacgatgtttctggtgacccatcttcattgatcagtatggaaaaggcatgtctctgaaaatctctgagagtctttgatacagcaagaacataaggataaatcattcttctatgttcatggttgtagaggatcttgaatgtttaatggcagaatagccagatcacactctggcacttctgtatgagaggctgagggatgttactgattcaccccgagaaatatttactactaaggggacagaggcaaaggggatacaagacttcaccctgagctgtagcgctccctccttccctatcctgctttcattcttcacattgttttccttctttcttttttattattatactttaagttctgggatacacgtgcagaatgtacaggtttgttacataggtatacatttgccacggtggtttgctgcacccatcaacccgtcatctaggttttaagccccacatgcattaggtatttgtcctaatgctctccctcaccttttccctgtgtccacattgttttctttctttttgaagcctctcattcactaggtttcaatcctgccttgctagtgttctaactctaaggcctaggcaagttatttcaccgaacttagcctcagtgtcctcatctgcaaaatggatagttttatgatatcttcagcccttaaagtcaatggttctgacagctagggtgtactatcttcttggatatcagtcatctcaagcaagccctccttttttggaccttcttttcacacacttcacataccttagagaacataatacacatcctctttactcagggcttattctttataacaggcttcctaattcaattaactcaacttttcaaaaatattagtgactactgtgatgtaaataaatttgcattttataggggtcttagtaacccagaagggagtggggaaaattaatatatattgagagtttattaagtgctaggtactgtaaatattttcttgtatttaatcctccgagtaattctacaacaaagatattatcattgctattatgtaaataaaagaacaaagtagaaagaaacccacggtcttgtataagctcccctagttggtgggtattgaagggagtatttcaatctttggtagcttctgagtttttgttctctcagggaatctgccagatgtccagggcacctgccaaaccctatgaggctataagaaaaccattaagggtcttagattacccagctttttgggagttagaattctgaatgaaatttagtgttcctgcagctacaaaggaattgagttagggaagtgatgactttatctttagctacattggttattttccttataataatcctggcttggtagattagaggcagcccgagtaacccagaatcgctaaaatagaagtgcgagctcattgcccgctgtccttcactatgtttgcatataggaagcaagaataaaacaagcataaaataggctaactagcttgtcagagctcttcacaccaagtctttgtgagttccaataagacactgactattattaaaaagacagagactccacataagtaggaatttattgttttccttttcagtcaccaaaggacaatcctctgcataggttagcaaaaaatggtactgatcctataatctctaatattaaagtttagatttggcaagctgtacatcttatgttgttcattaacaaaaaacaatattgattggtatcttgtactataacttgtactgtgggtcaaattccaatacagcaaataccattgcaataacaattctacaaaactacatcaaaaaaacctttcatgtttgagccaacagcctgatagtgctaaggactttgagtacagtatgctagaagattcttaacagttatttgtcctggacaacaaaggttgactccattaaaaacatagccatcagtgtgggattatttccaaatcaagcttttggaaaagtcaaatgaaagtttgcaagcaggtggggcatggtggttcatgcctgtaatctcagcactttgggatgctgaggcaggcggatcacctgaggtcaggagttcgagaccagcctggccaacgtggtaaaacccccatctctactaaaaatacaaaaattagctggcttttgtggtgcatgcttgtaatcccagctactcaggagcctgaggcacgagaatcacttgaactcgggaggcagaggttgcagtgagccgggatcatgccactgcactccagcccacatgacagagtgagaccctgtcttcaaaaaagcaaaaaacaaacacgcaaacaaaaaaaaaaaaaaccaaagttggaatgcaataaatgttcattgaatgaatactgaatagggagtttcagctaatccactcaaaatagtgctgaatttccagctctaaggtcaatgcttggcatatatatcctgaaggaatgaatggacacagagtaattttttttctaaaatgcaaattcaattatgtcacttcccttcttaaaatccttcagtagcttcccgtagcctccagcatattattttgaatagtgcttctcaaactttgatgtgcatcagaatcacctggggattttcttaattaactgatgctgattcagtaggtctggggtattgtctgagattctgcatttctagcaagtgctcagggttatagcaatgattttggcctgcagaccatactttgggtagcaaagacataagccacttaacttgacataaaagactgtttagacccttagtttctctctcgctctttccccattttgagcttttgctccggttcatgtttttccctgaaaataccgtgatcttacattgtctgtctggatgctgaattttccctaattctgggcctccatgtagttttaggtttgacatcacaaccaccaaaagatttccccttctcccttaatcttggttaatgtcactctcatgtattatactgttaatgaagcattgaggacataaaacttatcaaatattttatcacaatcaatgatggcaccagtgataacatccaaatgcctgggtgagtaaataagaggagaataggggacttgttgttaaactaagtttgcagagaaaaaatgtactgattataattaaattggatgtttatttgttatgacaaaaaaggagctagagtcttttaatccaccccttggcaccactgcttatctccttgtaacatacgtttgattcccatgtctatttcttccatatgggaaatttcagctccctaaacatcaccaatacaacctgttgataagacaaagttaaatttattgcttactatggtaagaaagaccacagcctggacaaagctttggtagtatttcataaggagaaaggtgaggttggatttcattgggagtatgaagcttggtttaagattggtctttcactgtgggggcacaattaggattgggtaaggatcatggtattacaacttagtttggtggaaacagcacagtgaagatttctagccaagaggctcagagactattaaggtgtgaactctattgatgttttttgttgaagagttgatgggagtttggggaagttactttagtgaacagtcaaattatttgcctggccaagagttatctgtaataggaaagttatgctaatgaagacaatggaaaggtaaaccatgttaatgtcgacagccagctatgtgagcataaggggtaggtagctttggtcctccatgtccaaactgtttgtagtggtaagtgatcttcattctcacatagattgaaagcttcctgaggacagggcaatgtctttgtaaactttaaaatatctatgtcctgcacatcacctgccgtagacaagcatctagtaattgacggttgggtagatactgagggaaaacatgcaccaaataaaaatggcaataggacacaaattcactatcatttggaagaataacagtgttttccactgatatttgctacacacagtggggtccacagagcagcagtaccacttgggagcttattggaaatggagactctcaggcaccaccgcaggtccaatgaattaaactctgctttttttaaggtcatttgtattcaattattatttttttcttttttctttactttcgatgcatttttctttatttgtttttgagatggggtcttgctattttgccgagtctggtcacaaactcctgagctcaaatgatcctcccacctcagcctcctaagtagctgggatcacagatgtgagccaccacacctggcttgtatcacattaaattttgaggagcagtgctttaatatctattccattctcatcacttgatgaggtattattaattccacttatggatgtggaagttgaagccagaaagtttaaatgacttgtacaaggtcaaacagcttacaggtagttgagccaagaggctctcaagtcttctgcctccacaaacccctgttcagctgctgccctacaatggaataaaatatactaatcccagagggacaaatatgctaaaaatctcaatattatacactttggaaggtgcaggtgcattatctttcaattctaatttctctttcaagttttctgatgcataaaaatatgaacagcaggtctgagcaatgtttagatgccgtgctttgatccttttgccattcaagatgtttgatttgcattctgccaaggaatgtctggtaacctccatgatgcagaccacaccattagtcaagagagagctgacgtaccttcatctgagagctggctggctgtgagctgctcagagggaaaggatttctatttacaaattgtatcgattatttataaataaaagttccccttgctttcttcagttgtaaaatctgcagttagagagtcgggaagaagatcaaaactgcatacatttgcatctgccaagcctgataactagttccagaattacagaaatggtgctgaaatagcacctcaagtaccaggctctatcaaatttaatctatccataaggcaactgccaattatattttagagaaaaaatgtagactgaaaagatagacaatccaagtagcaactcctgtaaaattatatgcccataggagcaatcttgaagatataaatattggtatgtttctccttcatttatcatttatctgatcatttgacaagtatttattgaatgcctgttaagggtgtagatatatgtggtgaggctgcaggtgtaagtaggtctttctgaggatatgcatgaagttgatgttcataacttggagatgtgtgtatacagactgaggattccttcagtggatattaagaagtggagtaataggcagtaaagaatacactagtcagttgtggtacataaacacgtcagcaccacttaggtattaacttcctgttttgttttgtgtgtgcttaattacgctgtttattaaacaagcacatcataatctgcagatattgtcataaacagcacaataaagcctgccacatcagaatgtcatctatcaaattaggtgtgttcctcagctgtcccgataggcacacacctgtgcctgtaaataggcgcttggcggagattgcttccaggtgtggatctgttgggcgaccttgggatgtagggcactttggaaccttttcctctagcttcaggaattaacctctgggcttggttccatgccagcttgcattttgctttgggacagtaacatgtaaagaatatgcctgtgaatttagggttactgagaagtcctcatagaagaagtaaaatttccttgaggaatgggagtcttttattcaatccaggtttaatgcaaggcttggtgaacagctccagaaggttaataattgcgtgcgtgtgtgtgtgtgtgtgtgtgtgtgtgtgtgtgtgtatccttttgtcattcaaaagtatacgtatacacacacacctgtacagctgatgataaatatacattgtatcaatgagttcaaatgaagtgtgctattcattcactgaggaatgggctattataatgaactattatgatattagaaattgtcagggcaataagcaaataatacatacggttttcaacaaactttctaagtattgttatcagtgggtttgcttaaatctttttttacaaatttatttatttttttgagacgaagtctcgctctgtcgccaggctggagtgcagtggtgcaatctcggctcactgcaaccactgcctcccgggttcaaaagattctcctacctcagcctcccgagtagctgagattacaggtgtgcgtcaccatgcccatctaatttttgtatttttagtagagacgggttttcaccatgttggccaggacagtctcgatctcttgaccttgtgatccatctgcctcagcctcccaaagtgctgggtttacaggcgtgagccaccgtgcccaggcaatagccccattgctcagtgaatgaatagcacactttattttaactcattgatataatgtatatttatcatcagctatacaggtgtgtgtgtgtgtgtgtgtgtgtgtgtgtgtgtgtgtgtgtgttgaatgacaaaaggatacacacacacactcttattaaccctctggagctgttcagcaaaccttgcattttttactttcattacagtgtgtaaataatttagcaaattctaatttgaacctgatatcaattgagcatttaatatttagccaaatatttatcaagtgctgactgtgttctagatgctggggctgcaatttcgaaacagaccattgaggccctcatggagctcacaataaatgatcttccttaaagtatcaggtctctggtttgttaccgtattttttaaattgttaaggaaagaaaaaggccctatctttttgtagacaaacatgccctaagtgcttccagaaataatctccatcaggtaatgcagactgtgtgtggagtgaaattgagtccaatccatgatccagcagagtttcagcccaggatttctttagagcctttgctacacacaaagttggctgatgtgccattcagcatcccagcagctctttctcttcacactagcaatggcaaagctttgtgcggaggcattgctggctgctctgaactaaaagcatccgtggggaccgaaagaggtttttgcacaccttattaaggtaggcaagtgtgtctgagtgtgtgtgtgcctaaaagctggaagacatctgttgagaggaaagtgctcttctgtgggtctggcagcttttctgtaagtcttctattctgatgcaggagcgtgtgagcagtgggtgggaggagatgctttggtacttggaatgctgaggtccggattaagtggtattgtaatagctagttagaggcagaataaaaagctgggaatcaaagcatttaaaaatgcatccttccattatttgctctcaagttaaaccatattcattctaggggaaattaaaaaaaaaaaaaaaacacagcaagggcaagtagcccaaatctgtaaggtctttgagcttctctgttcgtccagcttttgaagtcttcctacagccaatttgtttggctcctctggagggggcaattcatatccacttccctctcctggagcatttctttcttctatactccatcagggaacaatagagtttaacagtaacaggcaattttttttttttttcaaagcttgtgccctcttctgcgtttaaaggtgttttttaagagactcctgctaggggaatcttggcgcctgtgtgttaagacggcaattaacttttagtatcagtgcttacattaaattttctctctttctgctttactaaagcagtcattaaaattcagtgtgagtaccatgaaactttatcataaaaccctgctttgcttagagaaccttgattgttttctgaaagcagccttctcagtttatatatacatagctgccttccttggaatatcaaattgctttgtgtcacattaagaaacactaggttgaacctctatactgtgttttatctgagaaaaatactactgcaaaaagtttgatttgttcaagttttaggatgaaaatttctttgtaacaagttatttgagttgcatactatgtcatcgtatatctctttagttcaagtaattttgcaattaacatacggttatgtaaagaagataatgatttattttttatttatatttttaaaagttattaagtgaggttttcctttcagtaagagtttagaaaaaatagccagaacaagtaactggacttggaagataaagatacctttgcacttctaaattttacctttgtacacttcggttgtgatttaatcattgaaatgcctctgctttgaagtaaatgcatcacttatggtgtatgctgtgttttaataaagggaaaacagttatgggttctctgttgcacatttgaatgttgttattttttgctgtatttaataacctcttttttctcttgtgaggtttactttggaaatgaggcatgttcaaaaataggctgacattcagcttctatgttttaaatttaaatgctgtctgtgttttatcacatctggaatgtgtggggagaaaagataccaagttttattatttagatttaattgtagaattgcagattgatatttttcaatgcattttcattatagtttctgccatggaggcagcgtgagggctttcaggaagatggagtggtgtaattaccaggtgcgcacgttcattaatccttcctggctagagaaagcttcaagttcttctccagtggcccattcgtaaagctataaatatctaaattgtgtcagccaagaagtcacacagaatggtggctctttttgagttcaatttcatgcactgttgctttggtcttgtgaggaaagctctgaattccttaggatagtcttggttgtgaagttccaaaaacaaaatatcaaatcattaaggatttaatttaaaatacatactcttctttcacaaactagatgattgcagtaatgtggattataaatttttttttttgctttatttctttagagctcctctttttattttgtatgatcaagattatagctgagattttggtgatttttttaaaaagatttatggcttatggtccatcagtctctccactacttcaaacctgtgtacccctgtatattatctgcagtactggaatgtttgcattgtatgtggaagctatatacgatttggtaaaaaataacacttaaaggtcttcgctaagagtgcttatttaatcattaaatatcccttaataaaaataattccagagatattgtctgtgtacaaacttaaaaaaagagaaatataaaatactgtgatgtgaataaaatgtatagcaatacactccaataataccattcttatgttttcccttgttctcaactgaaataactaagctaatagagacgtcagtaaggaatgtgttgtttcttcataatacaactacaaactcatctgataagaacaacctgagagtgaacgttaactttcctcattagaaagattcaatttaacacatatatacaaatacatttttaagataatgatatttgcagagtttttgtattctatggagtaaaggagaattatcacatattcaaagtaaaggtataaaatacatcttaatgttttacttaaattttaaagggtccaaaatatactaaaattgtttttctaattctttcctatgtttaaacgtgccagagtcattggaaataggacattctttttcttaagaagattttgcccaaaatatttaaaactattttcttttcccttgattttacaatttcaatattcatggatttttctactttaaaaataacagtagtttttatgatcttaaaacaaatgtttaagggcactttcgctctctggagactataccatccacatatttattatcagcaaaagaaagggcagggcatacttttatttgaagttgagtataaaaatgtgtctgtgtgtgagtgttattaaaaagataagtgaagagacaaatatagaatccaggaacattttcagcctggcttttactctctctaaaaatctaatgaaacccttgagcatctcttatctcaaggtacattaggaactgtccaacactatgatccgatgggagatcagtatattcatataaagaagaaaatttgttgttagtgaaagtcaagtcttttaaaaaaataatagttacagcatttgcaatatacaagcataatagatttactcaacgcccaccccccatctttaaaaaatcaatttccgacagttgtctactttaaaattgaacatatttgctacctggagggaacattgtaatgtagcccatatgtggtatgcatcctgaagaaaacctgaaattatagaggaagttatcctgccttctttcttctgttgaatgagttaaaatatattaacaatttgcctttcactttgtatttatcattttgtatctttgcatatttacatatacattcatgtgtacaagggcatatatactcacaggtcagggctatttaaacagctatttatttgaatatgccagggaaaatctccaagatataaagaagcagttattagatactatgtcagtatagaattaacagccatcttttttaagatggaagagaaaattaattaattacatacaatttctaacctcaagacattttctttctggagacaaggaatactgaggtgctcacgatagtgaagactcaacaagaccctaataaaatagatgaggataagtaaaactacaatagccaataaaaaacaaaaaacaataaaccatgtttcgctggcatgttggtgagtatctctgtaatatctgtcaataagggtctctgtagatttggagtaatgttcaggaactacctgtactagagaagacagtggagaggactccagtggctaaattctgctgcctttgcttccagaaatgtaaataataaggaggtattgtggcatttcctggaagcagtagtcttgtttcatggtctgactgtataagaatgcctagagaaacataacctcagctgactaaactcccttgatgattgtcactttgtcactgaactctgaccataccttttgcctccagaggcaaaagacgggtgaggaagtgatctcctcatctggtttttaaacaagtatataactagagaactggattatctcctaaacccactcttgtccctggaaaaaggggagtcatcctatccgtttcttagccaatttatgtatactcttagtttgagagcatgagaaggaaaactattttcttttcttaccttggctgggtttttaagaatttatttttagtttaatcaaaataatattttaaaaggtagtaagcctctcataagcagtttgatctgttctaaaataacttcaatttttctttttttaaactttcttttatcttacacacaaagtataatagtaatatgtactcactagaacaaatgaaacaggatggagtcacatagagaaatatatcatattctccctatcccctcccttaatattaacatttaggtgtcatgtgcttctccattaattttcattgcaaaggcctaaattttcttccaagagtgaggagtagcagcacggtagtttggacctgatatagctctctttccctagccttttgcttaagtgctttcctaggggctgactttacttacctaaagatgtttcaagcaagggctcacatttttggtagcagaagacacttactgattgctctcactaataattttgaaaggaatgtcaaaatctgggaggatcatgaaagaaatatcagaaatttcctttcagctgccattctccttaatactgttatcaataaattcagcatctcatatgtgatagcaaaaaaggtgctgccttttgttcttgcatcctgaggttcttacctaataccatggtagcaataaagatggtgagaaaattgcttcttctatggtgttcaggtcctgaacgagcaccctcacctccacagacggtggcaggtattcaagcattttacagactttggagttaaatatagcagtgttattctaatttaggtatgccaccaccagcggcaccggcaactgcaataggaaaaatgattggcaatgccagctatctgatgttttcatgtgccaggtgctgtcagttcttcacagtattacattccatcctcacaacaagagagtgccagtgagtgttgctgtgtgccagtgcccaggctaagggctttgaacacattaccctgttttatcctcataactttccacgttatttttattcctgaatgaagaaacaagttctctgtagagatgctgtcattgatccactcatatcctttcacatccgtttaacattttccctgctgtgcttttactcccaacaactagctccctaatcgctctgttggagggtggccttgaggctgccagagcctatttggtctgtgtaaagagagagatggatctatcctggaatttatgtccctgtgtgtgggaagcccttaatcaatgactgctggttgcagacacataaatacgtgagctttcttgttcccaactgagaaattcagaagtgtgaatggcactgccaccctgggcttttatgccatatatgtgtttggtctgtttcccttcccaatctcacttcattttcccttaccagtgtttcttgaaaacacatcccattagatcatttttgcatgaagcttcatctcagaacctccatttagggaacccaaactaagatattctctaaaatagaaactttattgataaagtttccaaactgtcttagtagatggccaatataagaccaagccaaatctttctgggtccaaattccctgtctttaattaatagactccattacaacacattcttcaatctttagtcagcaaacacttaccacgtgcctattttatggcatattatatttataccatagttaggatattatggttcatgaatattttatatctgtacacctgaaattctattgacctctctgggccacagttttgcatctgtaaaatcagcacaataatgctacttatctcatagagtagacttaaaaacgaatgaaatgatatatgccaagtgttgagaatcacaattggcaattactcatgctcattaaatattagctgtttttatgagtattgtttcattttcggtgcataatatcctatgcaaagaacaaaaggtattggtataggcattgaaacttgaagcatagaagaaaaagttaattaaccggtgccccactagatgcctctaactgctggctccgtgtatccctttagccttggctcgtcacgagaaaaccttggagacatttctgctggactcagcagatcaatttaagaaagatgaatgacatttttcttgaaatgtattcagtcatagctgcctttttctactttcatattttggagttcttagaaaaaattaaggactcctttttttaaagaaaatggtataaaagaaaatgcatatcactttgtcactttattattgtaacctcatcaaagtattcagtgtaaagacagtagccaagtgaactcttcttgtaatgctcggaaaccattttagcaatggtaaaattgctgcaatttatattcgtcaaattgcatgatttgacttattttagaaaagttattaacttctgaagagaatgcttcagaagcatttaaatgagtacaagttatcaccagtgatatacataaatttcatttcaaaatatacttctagaaactgtacttagttagctatagtatttgtacaaggattaattcctatttcattttgtaggaatttatttatgaatgtctatggcctgccagtgtaaagcagacttagagcatcatcttttacaataatctttttttttttaatcaaaggggagatattctggtaaaacaaaacaaaacaaaaacaatagtttattctgcatttttattaagtccctctgtaagtcatccctgaaatgggatatgtagagtcttatatttatttatttctcagaagcttattggaggtgatatgaaggattttaagaccctactaactaacaaaacaacaatttaaaattaattttcaaaataccttaacaaatcttattctccttattttcaaattctttaacaatgtttttcttattactaacataatatcttctgatgtagtcataataatatctaaaatgacaggtctaagtaacttacatggattaattgagtcttctaaatagtaaggtagatggcactattacttctatatgagaaatgaggaagtagaggtataaataagaaattttttggccgggtgcggtggctcacgcctgtaatcccagcactttgggaggccgaggcgggctgatcacgaggtcaggagatcgagaccatcctggcgaacacggtgaaaccccgtctctactaaaaatataaaaaattagcctggcgtggtagtgggtgcctgtagtcccagctactcgggaggctgaggcaggagaatggcgtgaacccgggaggtggaggttgcagtgagccgagatcgcgccactgcactccagcctgggtgacagagcgagactccatctcaaaaaaaaaaaaaaaaaagaagaaatttttttgagtgtatacagttagaaaatggcaaaatgggaattcagacccaaacagtaagactcaaggatacctttcttatcagtatgctaatatgaaaacctaagcatactagaaaatctaagtgccagttggaaaccagaattaacattttggtgtgtaactttctggctgctttttctatgctaacaaacatatatgacatacaaaaatacacacatacacaaattcctgttcactacttcttttatgttaacatcacaatgtaccgtacacagctgtattattttatatttgatttcatattttttctaaagtcagtgtatttgtcaaatatcaacttatctatttaataggaatatgggatgatctttgcttatacatacatacatatgtatataaaaacaaaatcaagtattttaagcgttcaccagaagtcatatgtcaatcagtaaagtatataattttttgctgccaatgacatatatcataaaaacgctacctatcatagaatgaaaatgaaacacagcaatattgggacacctattctcaagcaacagctttgtgatttattagctatctcacatgaaataactcattaacttggtattccaagcagcaaaagaaggatcacttaggtcacttgcaaaataatacaaagctaggtttaggggtgggttgcgcttggtgggatgtagatgaaaccatatgggcccttgagtttataattgctgggatctgcatggtgggtatatggatgtttattacagtatgctagtgagttaagaaagaagaggaattattattgacttacatcatagagtttatgcaaaaattaaacgataatttatttttaaactctagaggtataggtaccatcatgaagggacccacagaactgatgtagccagtaattattggagctggaacagatactctgctgtcagttgttctggttttgtggtcattgttcttgcctttgcaagttaccaactctaagaccttgggcaatactttaagtcttggttgtctcatctgtaaaatggggagagcagtaagtgtcttaaaggtttattctcatgttatatgacttacggtatgtaaaacatctgcgtttagacacatagagggtgcttaatggatgattgctctcattattaggctacatctaatctatgaatttaaaaactgtatagaaatatgtgacagattctttaagagccaaataccaactacagtgaaaaatacttaacacttgctgagctcttagtatgtgtcaggcttaactaccttaatgctcatagcaatcctataagataggtactcttgttatcctattttatatcttctaaaattgaagcaagggaagttaaataataggacaaagatcatacgctatctatccatatatacccatctggctgtctacctgtctccttccatccatccatccacttattcatctacccatccatccactcagttacttctctctctcccaccatccctttccctttccctctccctctccctgtctctgtcactctcctttacttatctatctatcgatggatcggtttatctatcatctatctatctctatcatctatgtatagttgttaataacactaacattttataaattacaagactgaaaaatgttttcattaacttatggtaacaaaagaccacattgtgaataaaaaaagcagtaaacacaggtctctgcacatatgaaagagatgtcctaaacaggaagagatgtcctaaacagtagggatacatagtatcatacaatcaaaacatggcagccctataaaacttacaaagcaatttcatgtaagttatttcatttgactcttaccacaatctatgaggttactatttttatttttctcattttacaggttaaatttaatatggcttccaataaaaaattagtatggttaataaatatcttgacgtcttgctcctataatcctaccgatagtttacagtaattagtaaaataaaataataggaaaaatacctttgatactagtattaaattataatcatatcattaggtaatttcaatttgtgattttcaagaatctgtaatatggtagcttcttcctactgacatgtttgaattcattttaaggcttataattcacaagtaatctatatattatctaaaatgtaaatgcacattcacatggagataataaattagcgtgaaatggctgtattttgctctctataatttttaacatacaggaaatcactgttgtctcaaaaatcaaggaaatatagtatttgaggtgaacttattctttctactattaacacattttaatatagttctctcacagtgcaacagagcaagaagctttcagacacatttgctgctgcaaggagcatgctgtgctgaacttaaaacaccttccctttcaaactccttgggactgtttttttccaagagacttcaaatgcactaaatttagcatccgttggaggcacacccaggcatattatagtgaaagccccaataactgaatgtgttaccactattcacaatgtttatgtgtgtatatgccttatctatgatgtattgcaaattacaaaaattgtgttattattcacagtaacaaaaacacttccagcaaatttctaacagtgatctcttttgaaataacttacatacatgtgtcatgggtcttaaactttgtcacttttatgtttccatcatgttgttttagccagtgagggttttgtttggttttcatttatgattatatactttcaaaaaatagatttcaaagtgtgaatttgattgattgattgactgattcattgagacggtgtttcactcttgttgcccaggctggggtgcaatggtgcgatctcggctcaccacaacctctaccacccaggttcaagcgattctcctgcctcagcctccctagtagctgggattacagatgtgcaccaccacgcctggctaattttttgtatttttagtagagacaggggttcaccatgttggccaggctggtctcgaactcctgacctcaggtgatccaccctcctcagcttcccaaagcactggaattccagacgtgagccaccgcgcccagcccgtgaattttatttttgaaagacaagaatgtccttgcctaattgcataatagtttaacatcatgaagactaaatatgctttttagccatgacaattttatttattattgttttcatttttaattttctcaaagatcctcatcagtgtactctttttggtcttccttataagcgtattttaacaggacataataataagataaatcccaactttttaaagttgtatccgtatgtattactttaaagtgctattaatataaacgaattagaggcaacttttattcaatcagattttaagtaattttaccaaaaatatggccttgataatgtctctgtaacaggttctctgtaatatacatgctgaggattggtttgtctttgcttttgatactattttaattagaaaagtaatggggaatccagacccttctcatttaataatccagagaaaaatcagtccatgttctaatagtttaaatttttctactaaaacccatgtgagaatccatatgagtggaatggagaggagttcagcttcaaagttggcagatttgagatgattctatggcaacagaaatgtgcttgagggaaatcagttgcggcatcttctataattgtgtcacctagattttgccttaggaatttctagatttccatagaacattgtgacctcaaatgctttatcttaataaagaaataaaagcagattagaagaattatttgcctacagtttgtgggagatgggcaagtcttaagagtttattaggtacccagaacgaaacatattttcttgggcctcataatcacattgaaatacaaggatttagttatacacagtgaccagttagtgaatgacagtcttcagtatctagtagacagtaaacatataaagatgtatttgtggccgggcacggtggctcacgcctgtaatcccagcactttgggaggccgaggcgggcggatcacgaggtcaggagaccgagaccatcctggctaacacggtgaaacctcgtctctactaaaaaatacaaaaaaaaaaaaattagccatgcgtggtggcgggcgcctgtggtcccagctactcgggaggttaaggcaggagaatggcgtgaacccgggaggcggagcttgcagtgagcagaggtcaggccactgcactccagcctgggcgacagagggagactccatctcaaaaagaaaaaaaaaaaaaatgtatttttacttttaactacagcgagagaccctggcagcctacagcatacaattagtgttcattatttagattgcatggatttaatgtgaggggtcaattacttgtctaaccagtgagcctagcctcttgctcaatactgcctgcttcatgagggtgaactgtgctggagaaatatattacaggattatctgcagattttttttaaatgagtggttaagtcaaaagttcttgtgaaaattcagagtaataaattattatgaagttgtgtaactaggtaaaggatagtttcttttacacgggtaaagattaacatgaggaggaaaactttagcaatggcatttaattccattcaatatatttatattgagctcctttaaaaatacagggccttgtggtgggtgctgaggacagaacaaaaaccaagtaatacatgaacataacccttgatttcatgatctagtagacctataaaagttgtcgatatctgatgaaaagaaaatggtaaagatattccaaacagtgtatgcaaatccagagataggatggaggggctctacctgaaggatgatgataagaaaaccgtgttgagtgaagggtgatttgtggaattcagataaaatatcagtcttgaatgctgagtgaatactcaatgattgactagatcccatggacagtaatttcttcaattatgacgatgctagtgtttatgactataactatcattctccatgccaggcactttgccatttggtaaatgtatagtgtgctattctaacaagcatgcacagagcttttactttaatgtatccatgagtttattggggttcagaatttaggtaagctttgcaaggtcgtagcatggagtaaaatatctgaaattcagacccatatctaactaagttcaaagactgtacagatatttctcctcctttgtgcagagaaggataggaatggttccatattatcatggacttagtcagatgttttaaaattataatgtcctgtgttaatgaagaagggatgatattcagtgcatattcttaaccgttactttgcttaatgctctcgacttttctgtgagatggatagtgtagataaaatccccaaggggactcagcaagtgcaagtaaaacaatgaaactttaaagccctttgtcaaaacctctctttttctcagaggatggaagggccgtaaaggttggtgaggaaggatggaccatttcctatgtagtcttctgacaatattcaaacaaaaggagagtcagcaaatcccccttgatgtgggaagttttaatacaatttgcagagtgtctctctggagtagacatcctcctctgcaatcgtgtcttctatatagcctcagggctttgggtaggtaatcctctccaaggagagtcctggagagggctgtctaccccccttgcaccatcctctaacattattctatagctcagctccttgtttctgtttcctgccttgtttttgtctgagtctgcaattatgatgtaagcaccatgaaggaaggtatgttgccagtgtttgcatcagcatatcccccgtgtgtagcagcgcaagggatatagtgagccctcaatgtctatttgtagaaaaaagaatgaacgtatcaacgaaatctgatacatattcattgtgtctgttatctccatctctcttgtcctgccttgttatcttgccattttcacaaaaggccccaaggcccatcatttcttgtgtaacttccagagtgttaatttttaaattaaaattaaggctttctacatgagtgtctattatttgagaaaccatgcaagatcgtgtgtgtgtgtgtgtgtgtgtgtgtgtgtgtgtgtgtgtgtgtgttgcactctatattatattgaattctggattttttcttataaataaaattttaaaaatagttctttaaaaataggaataagatgttttaggaggcacagagagcaaaggagaataaaaattgcaggtttggggttgtgcatactaattgccattgagtaaagagagcacactgaggccatttagaagagaattaacgtgttttgtttttgtttttgtttttgtttttgtttttgtttttgttttgagacggagtctcgctctgtcacccaggctgaagtgcagtggtatgatctcggctcactgcaacctccacctcccgggttcaagtgattcttgtgcctcggcctcccaagcagctgggattagaggcgcccacaaccacgccaggctatttgttttttttttttgtatttttagtagagacggggtttcaccatgttggccaggctggtctcgaactcctagcctcaagtcatccacccgactcagcctcccaaagtgttgggattataggtgtgatccactgcacctgaccttatttttattcatttaaaaatattaaatgttactgcatagggagtaatgggcttaacaatgaggtgaccaaaactcctatgtaccatgcagagcaatgtatcaaatgtttttaactataaacttctcaaaaacataaacctaattgttctgcagctgcaggttatatctgccttgtttgagcaaaatttggtggtgaaaatgccttgcttccatttttccttcaataactgatatggtttggctgtgtccccacccaaatctcatcttgaattctactcccataattcctacttgttgtgggagggatccagtgggaggtcatttgaatcatgggggcggtttcccccatactgttctcatggtactgaataagtctcacgagatctgttggttttatcaggggtttctgctcttgcgtctccacattttctcttctgcttccatgtaagaagtgcctttcacctcccaccatgattctgaggcctccccagtcatgtggaactataagttcaattaaactactttttcttcccagtctcaagtatgtctttatcacagcatgaaaacggactaatacaataacctatataattttgaaaagtacttgtctaatagactttcacaatagaaactatatccttatcaactttgaaaagtcattgcttaatgcctttggataactgaattttctaagattattttaattttgaaagttaaattttatcccagtgttgacgatttttgtatgctacttttaaaatattttgtcagtgatttatatctatggtgcaatcttgtaaaaaattaacaatgcaaatgtggctagaccatttaaaaatcaatatgttataattcagcccatttaatcactttagttaaacatcttaggaacaactcagttccatttgagagaagacacagttttctagatgtgtgttgtggcatcatattgctttacaatatcttacataaggtgaattcaaatcatatcattgaatctgttttaaattctgtcatagcttaagattagtgactaaatattggcaggtttatggaagtaggatgtaaacaagacaaaaacaagggtggaacaagtaattttagtatattattcacttgcacagagaaaagtcattcacaccttcttcagctttgtgaagaaaatagactaaaatcctgttgatatagcaactatgttttccgtttcttgtataaaaataaagaaaacttcctattaggaattagccagacattttaattttctctcttctttctctattttcccttacagtctctttgaaggcaggcaaaatttctataaagttttaagaatgttttaagatttttttattgtgaaatattcatagactcacaaggagttgcaaaaacagtacagagatttcctgtgtatacataacccaactttccccagttacatattaaccaaatacagtatattaccaaacccaataaactgacattggcacagtgcaatcaactagactgtagaccttacttggatttcacctgtttttgcacatgctcttttactgtgagtcattatctgttattctatgacattaaccatgtctatagatttatatagttactaccactatcaagataaagaagtgtttcatcaccacaaagtaacttaaaggattatttttataaagtaatgacaaatgtgtcaaaagccattcctgtgttatatagcaagtatgttttgagttattaaaactcactgatcatgtctttcagtgtcataactttgggtttccctccctaactataataatcctgatgaattacagttgatgaatatgagaatatccaactcttcctgactctataaatatattgactgagattgtaatatttatggtgtcttaaggggcgcttgttttattatgatgatgtgaacatgttgagaatagtaagaacagcccagtttagcaaacaggatatgagtcttctatatccagctcaatcgttgccccaacaggggacatctgcctttgctacttaattttccattctggaaaatgtgaagtgtatgagaatgaataatcgtctccgattttccagcacataataatctgaggagagcaggtacagcaatttaggagctgttttcttttggtttccaaaaaaagttccgtccagtggtctaagttagtcgtttactaagtgatagagcaattggctatgctttttgaacggactgataattatgtggatgcagcaaataggatatagacaatgcatctactccattacagtaaaaaagactctgatagcagttaatccacataccaggcacttagcttaggcacagttggaggaaatggaatggtaatagactgtagtatggcatgacaggagctgtagcttgagattcagaattccaactctgcctctcaatatttgagtcctcatggccaagatatgtaaagtgctctgtgcaggtcttggcaaccatccaccacacacttagtatgcaatatctatctttattagtcaaggatctggaaagctagttgatgagacaaatgatagaaacaagagttcattagatgaaataaagtaataaatgatgcaagaatttaaaaaagatttagagaaggaaagggaacagaactcacatgcaagtagagcaactgtgtatcagataatgtgctagctgagttagaaaccatgtctcatattaccctgaaaataattctgcaaagctgtaggtgttatttttttcatttgacaggtgaattcatgaaggcttgaatatagggttaagtgagttgtttcaatgtagttattgattcaaatcaagatctgaatgactctaaatatggtgctatagagatttgaagtaggataaataggatttgaaaaaaagaaaaaatatatagggaaaggaattggtacactgtagcagtgtcataaatgaagcttcagttgtgtgattccagatgatgtatgtgaggcctaatcaaacagctttgtggaatcaaaatttctgctcttgtctccaactggggacgagttggctcgggattaaggtgggcgaccttgggaagactagagtctaagcaggactttagtccctcataagaattatatgaggatgtatatttgcatacaaattcctgggcccaccgagatctgccaaattggaatgtgtggtgatatcacccagggaaacatagagagctgttataattagtcatgaaatatttagtactgaaattatagattatgttaaataatcacttataggggacatagcagggttggcaggttaaccatacagcaaacagggttgtaagtcagggcctagagaattttcaagaggcaggaattctgcagaatgaaggcctggtctcatgcagcaccatggacagctccgaggcactcttgtttctccaaaaacctgaaatcaaaaactttgcttttcatcatgcaacatacccatgtaacaatcctgcataggtactccctagtccaaaattaaagttgaaaaaaaaaactatactttcatttgaatacagttctcttcggctttaccagctctactctggaaggaatatcttttactcaatgaaaggccatcccctgttaatgcctggccaggttctccttatcagtcattcactatctttgtgtgtgagtgactaaacatataatgctatgtttagtggatggagtaagattacctttgcagaggttgtactggcttacccctttggttcttgtagttttcttctattagagttttttccatccctaggtttctatactgttcaaatgggtttaagattcttgaaggtattcctctgaccttgtaatttatgcttgtctcctagcacaacttttttttgtaaaggaggcaccaactatgtggtttgctggcgatggcatacacaaatcaggtgggaggaattaatgagagcagcaattccaatatctggttcttcaagattaacttgtatagtttaattcagcattctaaataagcctcatagatttaaaaatctagaataaacccacatttttaaaaaaagttttatgttatctgtgctgataatgcacgctgtacataataaaatattattttcttttttttaaatttattattatactttaagttttagggcacatgtgcacaatgtgcaggttagttacatatgtatacatgtgccatgctggtgcgctgcacccactaactcgtcatctagcttaaggtaaatctcccaatgctatccctcccccttccccccaccccacagcagtccccagagtgtgatattccccttcctgtgtccatgtgttctcattgttcaattcccaatattattttctaagtggcagtggaagaaacatggaaagttctacttcatccatcggtggattagaatttgtataccatgagatgattaattttcaaaaccagtttgaatctcacaaaataatgaccctgttttttgaaggacaaggcagaacaaggaactaggctgtgccacgttcaagtcacaatctctaacatttgttttgttttgttttgttttgttttgttttgttttgttttgtttaatctctgttgcttgttcactttctcttgtaatctgcattgatttgctacctggctatttgtagattgacttcggctgccaggaatggaatgtttttcataaaggaacatatgccttaatgaaagtaccataagaagggagtagagtgtgaccaattgcctaggtaataagtagtgacaacaatgatattattctagtataaatggaatcagtttttctttgcccagggggcatgataaagaaggcctggctggtatatactaggtgggacacaccaacagtgcctagaatgtcaatggatcaaacctgagggaaccagaagttgaaaagacatatcccaaaagaaagcatttgatgtttaagggttggcttacttagaacacaatgaaaaatattactaaaattaaaactatgattttagctatttttaaatatgacaaattaaatagcagaacattttaataaaacattacttaaggtccacaattttctgtaagtctaatacatgggtcattaaaataaaaaattccccatgatttatggaatcagatttttttaatacaacgaattctaaatggttttataatgccaattccaattaatatcctaattataacatgtcatccagaagggttaatgactaaattttattaatatttgttttctatttattttgatttgtgcagtttatgtgtatagtaacgatagctgcaaattagataccattagcattaaataaggtatatattttaatagaaaattaaagttaagtatttgagctagcctaaaatattcaacaacttaaatttgttttttgtggatcacatttttttgagacaaagtcttgctctgctgcccaggcttgagtgcagtggtgcattcatggctcactgcctcaaccatccaggctcaggtgatcctcccacctcagcctcccgggtagctgaggctactggcgcacgccaccatgcccagctaattttttgtatttttttttagagatggtgtttcaccatctggtctcaaactcctgagctcaagcaatctgcccaccttggcctcccaaaatgccgagattacaggcgtgatccagtgcactcacccctgtgaaccaccattaaatagctaataaaagatgcatgtcaataaaaataaacaacttactagaatgattatgtgaaaatcatttattcttccaaagcatgaattttcaaacacaccttttgttactgttttaagaagggaatcatttccatatatttgcatgtaaatcacttttagtctcagagaactttccataaaagtttttttattactgctgtaaccgatagagctagtggactattaatttaaaaagctgtacataaaaacacatctatagctcaaataatctaggataccttttagtttggggaaatgtagatgaaaatgaagtaattacagaatccttgttaattttcagatttagacagtctaggcaatatctttcaggaatgaagagatatgtgttttttggcatcttggtagagtatattcccattgtaattcttttgtgaagtctagaccagatgtggccataaaaatagacccctactacaataatatatttcatagataatccaataaagtcaaatcttattgcagtaggcttagaactctgtttgcacccatggaatttatatcagtttttggcaaatcctttcatctctgaggatactttttcatctcacatataccctattttctgaacattttgccttcaaagtatacctcatttatcaagaatttctctttattcatctgacttatacaagtggcaataacaacgtctggttcccatgaagtaaccagtgaccctttgaaataatatagcgctggaagaaagaaaaggaaagggagactgatcattcagcaactctttaaaaccatgtcaccgttaaacacatagtttattttatcttttttttagaattgtgaaaacctatattagcatcttcacggatgtctcctttgtttacatccccgcttctgtgccttgcctgcagtagaaaaaaaaaggacatgtgtatccctattccccattgtcttctcattctacatgagaatgagaattcttttaatttcttctctatctacatgaacccacttccattatctgtttgttcagttctttaaatgccctgaagctagctctgtgactgggcagttgaaagttctggacttagcatcaggttaatttgaaaaatacttattgagccaccaccatatgtcagccactactgtagatgttttgaatgtgtcagtgaacaaagcagaaaagatgtatgccctctggattcttgggggtctcaaatagtgaaagacagatacgataagtatattgtatagtatgttcaaaagtgataagtgctgtgaaaaaaaagaagaagggtaaaataagagatggctcatgctggagtacattccaattttaaatagggtatcatggtattcttcattgagaaggtgacatttgagcaaagatctcaaagaatgaggcatggggttgaatcatgtagatatcagcagtaaactcattttgggttcagtaaacagtcaatgcagaattcctaagccatcggtttatctgctgtttggggctggttatctgcagtgtggctagagtgaagtaagtgagagaggtttaggagagaatgttagtgaggtgagggtggacctttgaagccattgtaaggacgtttttctctttctaagtgtgagaagatgatgctgactgagaccagggtgataagaaatagtcatattctgaacgtgtttggaagtggggccaacaaggatttctggatgaattggataaggggcatgggagaaaaatggagtcatgaatggctccaacgtttttgctctgattaactggaagggataaagttgccctaaactgaaataataaagactatagatagaatggggcgattagggaggcattaaatttggatatctgttagacatatcaccagatatattgaataggcaattgaataaatacctttagagttcagcaaaaaaggtccaggttggacgtttaaatttcggaggtgtttgtataagataacatttaaagctgtgatatcagattgtatcactaaggaagaatatagatagaaatgacaacgtgactaaggactctaacattaagaggtggattgacaaaggagaaaacagcacaggataatgaaaaggaatgatcagccaggcatggtggctcacacctgtaatcctagtactttgggaggccgaggcgggcagatcacgaggtcaggagttggagaccagcctggccaacatggtgaaaccccatctctactaaaaatacaaaattagctgggtgtggtggcacacacctgtagtcccagctgctctggaggctgaggcagaagaattgcttgtacctaggagacagaggttgcagtgagccaaaagattgtgccactgcgctccaacctgggcgatggagcgagacttcatctaaaaaaaaaaaaaaaaaaaaaaaaaaaaaaaagaaaagaaaaggagtgatcaatgagatgggaagaaaaacaaaagtgtgtggtgtcctcaaaaactgacgttctattttcaaaacctacattttgggtctccttttactatatcctgactttctagctatataaccaaaaggagaaagcagtaatttttttagatataacatgttaataactctaagggtattcaatgaatctgaataattcagtggtataatgtgaaaaaatatagtattcataggaaaaggaacagaagttagctcaggaaatgacttgaatgaacaccgaagccaaatctccagcgcaggtccacgtattatttgtctcagtggttgaattagcagcaagattccttagtaggatgaaaaaagatgttgtgagcatctgtatctacatgactgaattaaattcctccaacaatgaaatgtagttaacgtagtatctcgaaaagaaccctaagtggaattcagggaacctaaattccaaccatggttttgctgctgactgattgcattcacttcaaatctatcattaacctccttgtgcctcattatcctcatttcaccaaataagaaaaatgaaatattcctccttccctacctcactaggatgttgtggatttaaatgtgtgagaagtgcttgagatgcataaaatttgatggagtgttttattcatgaattcaaggcatctgaagtaatttgaccatgatggacagttgcttccttgcacattttttagagtgacatttccgttactgacccacccatttatgcaacatgttgcctaatctaaatttaggtcaaaacaaattgaccttataggtaagcattatatctattaatattgtatttttgtattattttataatattcatcattcacctattttctcatgcaatatatgttactgaacacatatagattaaaaagccttcatccctaaataacaatgatgggaccttccatttttatatccctctggcatttaaaatgtgcttttatagccatcatctccattgatctctcagtcccttgaggttgatatgacagatatgctttttccattttaaaattacggaactgacagtctcagatgactttaccctccaactactgtgtgaagaagcagggtctggcactgaggtcttctgacatccagtgtagagcactatacttcacaatatggccattggcttactttattacaagcactaaatattttccactgaatacgtaatacctagaggagaatgtcgtgtaaaacagcagcagtagaacagaggattaaatgacccattttcttgaagttatcttagttttaaagggttttttcttcatcactaatgaccatccctgactaagaaattattctcataatacatgataatatctgcgttttccaatgcgacaagaatgttaggatgtctatacatgatcttgacaatccctagctccatcacaatgtgtccaaattcattttatttggctagacaggcatgtagtcttactttcaatggttggctctgctggatgctatgtgatctagaacctgtcacttaccccttctaaacttcaggaattttttatccttaagataacaagaaaactcgtacctgtttcaaagagctgtttgttcaatcacctatccattgattatcttctatatgccaaatgtttttctaggtgctgaattacaggaatgaatcagaagcaaaaagttcttactctcaaggatcttatatgctaatgaaatagatgttaaaaaataacaatttttgtttcattttattttattttattttgttgagacagagtctcactctgtcacccaggctggagtgcagtggcacagtctctgctcactgcaacctctgcctcccgggttcaaatgattctcctgcctcagcctaccgagtagctgggattacaggcatgcgccaccatgcctggctaatttttgtatttttagtagagatggggtttcaccatattggccaggctgttctcgagctcctgacctcaggtgatctgccctccacggcctcccaaagtgctgggattacgggcatgagccagcgcacctggcattaaaaagtaataacaatttttaaatatcaatatgtcttatacagaaaagtgagcagtgtggtagagtgtaactggaatgtgagttgagacataacaccagacagagaagccagagaaggacttttgtttgaggaaatgacatttgaaaaggaacctgaatagtgacagaggcagatacctaaagaatatgttccagacaaaggaaacaaaaagcgtgcaattgcatagtcaacttagcctacttgaggaaaagtgtgagtggattttggtgatggagaggtaagtgccaggagatgaagggagagatctggcatgcatcagatgatgtgcagtcttccgggacgttgtaaagagttgggctttttttgtttataaattaaatgttaagccattggggtttttaaccagaggagttatgtgatatgatctatagttaaattatgtttgttcttggatggagtgtgcattatgggaatttatacagaaacaagatttcacatatatatatatataaaactcagtgtcaatagaaaataataaaaacaaattttatccattgataattctggcattgatagtagtgggtatggtggtaataattgtgtgtaacactcaaactttctgaaaacctacacttgatctgtaaatccaaaagtatatgtagcaaaagccataatctgctcttatttctgcaccacttgcaccagtgtggagtgataaggcaaattattcaggcacctgtgtaagccttcagtgtcctcacccccttgttataactctccactaatattacattggtaaagacgtccctgacctatatgtcactgagacctcaaagaaaagagcaaagctaaagcgtaagggggaaaaaagccagcttaaaaagacttaaaggtttctgggaccaaaaaaaaaaaaaaaaagtctttgaaaaatgagaaaggaaggatagaagaaaagattctcctttggtcaatctggccaacctttggaaataaaaagtattgtgttgcagctaataactatttgtcactgcaggcacttgctgatgtctgccctttaaaatgacccaaactcgttggcctcgaaatcagaagccaaggaaaaaatcttggacataatgttttctgtagaattaccaattttctctctctctctctctctctctctctccctccctctctctctctctctccatatctatatatatatagatgtatatatattttttctgtaggaactaccaattcctatctatagggactgattgagaagtcccttatagcagtttttctttggcttttaggatgcaatgattattggtgagaataactctttcatttcacatttgtcattggcttatttgaatgtaatcctgattcaatcgttatgatctcctttaagtaggaagagaagctggtattacattgtaggattttaattttgtactcatgaaacttttgaaaaacattactcatactcttctgactgtcaaattggcctctaagaggtccacatctcaagaggtatcaagcattggtaactattttttggtgttgttttctcatcataaaatgtacttttattaggtgactttggaaattttattgaatcaatgcatgacactgcctcattctagtaatctgatgaagcaaagctgaaaaacaaaatttgaggattgtcagtatatatacttttatttgcagtcaagagttatgctgcaaaaatggtttattgaagtaacaaaattttagctgatatattaatctgaaagatacagtatacatttttagtatggaaaagatgaggaaaaggaggttctctttcctctaggtatctagagcaaactgtaactgtccttggtatttaatttttggctaaggtactgagattagaggtggggccttagatatgattaattgtcagactgataagctagatatttcattgagtttctgttgtgctctttctttcagatcctctgttcgatgctttgttataaagatttgggcatttcaaaatcttctccatatctggtgtctttccaaacagcaggtcatagactttacacaaagaggaacgacacaggttataagtagaagtgttttaaaccctgagttcctatttcagttttgctttcttaaacatattttccttatgtgataaatgcgagtgttgaatggtgataaataccacccataggctttaaagcctaaatgttgaatttgacactgagagtttaaaggcatcatgaaaatttctccagaactaatgttcaagcaatttaggttttacaggcaactcaatagttttgaatgatgtagttattttgaaaaagtcaccataaaacgctatgtttagggaattggtactttgcatttatcagaagattgtaaatgtcaatcgattggcttgctatttggaatataattttttaaattatagttcaaatcattaggatttaattcatgattttgtactacaaactaaatctatgaaaaatatcagatatttattttaaattagaggcatgtaaaggaaaatataaattttgaaatgccattttactggatttttctcttcagcccaccctaggcatttgttacataaaatatttctgaggaagtcttccactgattttgtaaacaaacatgttttattgaacagttctttgttgactagattaacattgaccattgtatgcaatgcattctcaaaatcttagaagctggttttctttttaatcatataattttacttgttttacagtgaaattaatgcatgtaaaaagtatacctatatagaaagttaaaagaatattgctaactagttactatacttccaaattgcctattttctgtgtcttgcattggacagtagtgattacctctaaaagaaaatggatggtctttgtttcattgaagggatggataatggacataactggcattcttgagcaatgcaattgcaaatacatgtctttgcatttatggtccaatcatcttcttactatgatagcatataattgaaggttcaaataaatgcctcgtcccttcctgtggcatattaaagagaaagaaaaattagaaatactttcaaagctacctcacatactaatggtagagttgtttgagtatttaggtgatttaacaaagctgatgtattttattatgcttgatcattgaggaaaatttatttatcggaatgcttttgagagcatatatattgtcagagataaacacagctggatattaaagaggtaaaaacagattttattcaatacctcgtgaaattaggggagagctgagatccattctaatttgtgcagaggcgacttggttgttttaaggcaagaaggagggagaaggagtgggggttcattcgagttagagaagtaaaaaagtacaaagggctggacagtgtaaatgtgattaggccagctgtgttagctggaagttattgaagttaggattctatcttcccacagagaacaggagacagaggacttatccttcttgatgatgtcatttgaaaagaatggctttcaggtccttgagtgagagacacttctgatttccaagagctacatgttcacaattgtaagcccttttgagtaaatgttctaagaaacggaggtaagagtcctatcaacagatgtgtgttggctagaacaaacattaaattttcctggcagcactgagctttctcaagcaggcacttaagggaaggctagggtcatcctagggacatggccttctggggctagaaaccatactagagtttagtcaagtcttagtgcaagggtttggacagagttgttaagtgctgagagttctgtatttctcactgtcacaaaggaagatcagaagctcctgatacttttttcatcagtacaattgaatatataaatcctatacacaaaaataaactaagcttatacaagcatattggtcaaggaatgttgctggccttattaattagatagcccagttaaaagaagaattttttaatataattaatgttaaagtaggatgatagtatataaaacgtgtctactgtcctgaatacaaactaaactgtttggtttagcatttacctcaagatctcttaatatcccccaaagggtccctaaaaccacaacttatctttgtgctcatgaagtagagaagagacagttaatagacatttctagctgatagactgttgtagagcagagaacgctctgtgtttttgaaaattaaacatatgaatttgcccctcttcccctattaaggaagaagagtttcttaattgtgcgaacacatcaagtgaactattcaattagatttttgtgacccagggtataaacatctggttaaggttacatatttcaaaggaacaaaacactagaaactcttggttttaaatctcatggctggaggataatttgcagcagagatttatctggcaagcatacagaattgctgagactgttctaaagatgtaagtgtgggtgtttgtgtcgtgaaaatagctgtttacatctattaagtggataccgatggttgaaagtgccgtctatgtcaagtttttaccaaatcaacttttgcctcactgtgtcagaccattttacctaatcaacttggactgctaatgtcctttcccctggcaccactatctgtctcttttgcaaagcacagaaacggcatgcatgattgtagtttataaaacacatgtaccaatgtggtctacagcttctgttgagttcgagagggtcagtttctgtaatctcttctggcacagagtcaagaacagcttcactttcctcctgctacctctctacccgtaagtgtgaacccatcactttgctaacactcaggaaggggattacacaaaatagagcaggagccctctgacctgaatatgcatctgagccctagccatagagcttctgattcagtagatctgggatggggcctaaatatttgcatttttaagtgtataagtgatgctgatgctgctggttccaggaccacattttaagaaatatcgataaaggtggagaattaaactgcagctcagaagacctgagttcttgccccagcttgacttttacaatctagcaaatggataaaactcgcaggacttcagttctcttcatctacacagtgagtggttagattggctttgtaatttaaaattaaacagggtttgattctgattcactacacaaggttccaaagaaggaatgatatctcctttcatttcttcactttgtcttctgtccctaggtaatcttatctatgttcctgatttaacctaactaatgtttctgcaaagcttctaatatttacatctccagccctgaaactctcatttgaatgctagtcttatatacatacccccctgcctaattgacatctccacttaaatgtatcagaggcaactcagactcaacaaggaccaaactgaatgttcgaccttgtccttcaaacccgatacacatccaggttcctccatcccagtgaatgacactatccagttaagcaagccaaaagtctggattttttttcctcactcttcctcactgtccgtcaactaccattattaaatctgtcacctggtcctactgatttaaccttctcaatatctctacagtttttctttatgcccattagtatcctagtgcaagctaccatcgtctctcattggaattaacacagtaacccccctacccaccagactgttctgcctacagatagtgtgatatttaataaatataaatctagccttggctagatttctccttcaaaaggttcacattaattttagccttaaaatggtgtgcaaagctttgcatagtctgtcctttgctatgttggcagtattttttactatccctctcatctgctcattctctgtactccaactacactaactttgtttttttttttttttagatttctctaactacagtgctgtaatctctttttcctttgcacgtactattccgtttgtcagggaatctgctcactgtctccacccactccacacactcacgttttcctgcccgtcttaccggtcttgatcggttgtcacttgctcaggaaggtttccctggtcaccccctccacaaattgaattaagtcctcttgctgcatgctgtcctagtgctctttattttcctctcctcatccttaattcagtttgtaattacatgttatttgtgtgaggatttgattattatctgtgtcacccactagatattgggcattctttacttactcaccactgaattcatagaaccacagtaattgtacacaacaaatattcaagagaaatttattgaattgatgaatgaaaagttgtaccttaacatgttcctgacatgtatccaaaaaagagctcccctttggggtctattaggactttggacctaggtaaacgtaaccctagtttcgctcaggtttaaacagtagaaagtaattgggtctcttttgcatgtggctttcctaagggctaaccctgtcttcggaatgagtcaatacagcagagctgttgaaagcagactctagcttcggacaacgttggtccgaatcatggttccgtcatttcttagctgtgtgatttagaataaattaatgttttaaagctttgatttcctcttccttaatctggagatgctaataaagccaacttcgtagaggtattgcgatgagtaaataagcataatttgctgtaaacaccttgcagattgcctgttgtatgctaactaatcaataaattgaagctcttaacatcattatattagatatttccagcattgagtatactatcaggcatgtggtagaagctcaatataaagttttgttaaattgaatagattccatatatggtatttctacagcattatgctccttatttaagtgtctctaagtattttttaagtatcacctcacaaaagacagatgtttaattcattacacatgtgaattgttttagatagaaaataaaataaaaaattcaaacattgaaatcaatagtgtaccttaccttaggattacaccataaaatttctaccaatcgagaataaagtgtacagtctatttcctttctaatacttttaacgcaacaaatgtttattgaacacttactacttctaatctatgacagacataaagatgaataaagcatgccacaatgtttaaaggagctcactatatcataagaaagcggattcacacagacaactctataagataaagtggtaaatttaggctggcctgtgaaacaaaggattataggtatagttaagaggtggaatttattttacttcgaggatttcagttacctttatattctttgtctaacctttcatgtttctctttcttcagaaacagagcacctttttcctgacacattcatttccccctatggagtagagcagttgttttcaaagtgtgggtcccagatcagcatcacggggatggttagaaatgcccattcttgagcctcacaacagacctactgaaacagaaattcttggagagtggagcccgcagatctgtgatcaagccctgtaggcaattctaacgcacactcaagttaaagaaccacgggaagaaaggtccatcctgtaacaagacagatttttttcattagcatcaattttgatcatttatatatatatatatatatatatatatatatatatatatatgcatgctcacaaaaccattcaccttactaggttttagtattccccttcctgtattcatgtggtatgtatgtatacaagatgaacacacatttacctgagacaaggtaagactacacatgtctcatttggggaccagaggctgtaatcttactcaaggtcaaagcgtcttcactgctttctttcactgcttttcaaaagtaaaatttccatgtaggtgtcatttgttttctttttgtgttttagaaaaccgattaaggggtgaagtctggctaaacttagtgtcaggacatttacttagataaaattattttaatttatcttgtaatgttcaatgtgagaagaaaagtccttatgagtagtgtattccttaaataacaacaatttaaaaactaccactgaagtctgtcagagtagttttgcctcatttgtctagataagagaaaaaaggttcacattagggattgcaatttgtctgccaaagtgcagtttatttattcagaaacatttagagaggaatgtgtcagttctgttgcaggcactgtgctgtgacggggagctcaagatgatctcaaaaaatttcacagatggggtgggcagggggcacagagagatgtatttagtggttcagatactatttagactgtggccagcatttctctaaatgcaatccagataacaccttacagaatcatctgggcagcttgataaaagctgtagactcctacccttcatcccaaacctattgaatcagtgtctgtgtgtgaagacctagattgtgactggtaattataccaaagtcttagaagcaactctaggccagtaatactcacatcagaatcagctggagggtttgctataccacagattgctaggttagccttcagagttgctggtccagtaactttggtgcaggtccagattttgcatttccagcaagttaccaggtgatactgatgctgctggccttgatcgtgctttgaaaaccactgctttagctacgctataggaaaaaccatataaggcttttatactggccaatgacttcacaggcctgaattttagaaagcccccttctgcagcttggcctatagattcgaaggaaacagaactaacacaagaaagctagttaggagctagttaaaaatcatcctgacttgccaaggaaaggtgctgaagacctgggtcacagagcaaatgcaaaacactaggactttgtccctagttcaccattaaatcaacttattttctcttaccccctcatattcacgtttactccttactttgtagtggttggacaaaaatcaaataaatctgagaattctaaaatgcacacccttgtttattttctaactcaaatatgccactgttgtctgtgctctgtcaagatttcaacacatctttttctcctgtttgcttttccttttggcatatagtgagtgtgtgtatacacacacacacacacacattttttttgactccttccaatgcccttctgctctccgcagatacacttctgcattctgaataaaaccgaatacatatatatatatatatatatatatatatatatatatatatatatgcacacatattttgaaaaccttatttgaaaagaaagctttcggaggaaacgttatttagccacttaatcgagtcttttactgagggactttttgtcgtcccctaacttcctgtcagcagtccacaggcagcaggaataatgtgggagaagatcaacaggcttatttcaggaggtcaggggccagtgccaccacctgcaggtggagacatcagaagcaggaagcagcccaccagctgcagggagaactccccacagagcctaaccaagatgaagggacttgtaaatttcaaccctcccttttggcttttgtgctaaaaatgtgaatattgaggtctgccctgattaagaactagatacattcctctttgtgactgccacacttccttagcgtattcattttttgtctttcgatctcaagttattattttcaaatgcattgcacgtatctaccatggataccattgcaattggaaggagcaaacgttttgtatgtttacttgacaaagagaagtgactgcccaagccacacagagttctgcacaaatcagtaacttctaacgaacgtttgcacttccgggcttgttctctacctatttcagtcgatgcatttgtattatttacttcaaactccaatactaataatgcctcaatcaggttgcaattgggatttgagcagccagaatttcagaaatttggtttggtccatatctgtgacaggtcagtaaatcagagaagcaagggtttggttgctattataatacattgcttacctatcaatttagttatcagccaaggtggttgttatcatccaaagtggctcattaaccaccttggagactcagtatacaattgcaagtaaccctggaagttgtaaataatcccaactgaatttgtatgagtttggtaaggttaagtggaaaccagctgcttagggccttgattataaatgaagttaggagtggaagaagtaacaaaaccccaggcaaattcattaaacattttttcccttcaactttatgctcacgaatgtgttgagactcttctgaatccataaaacacctttcagcatcatctgggcagcttgataaaggctgtagactgcctgcccttcatcccaaacctactgaatcagtgtctgtgtgtgaagacctagattctgactggtagttataccaaagtcttagaagcaactctaggccagtagtactcacgtcagaatcagctggagggtttgctataccacagattgctaggctagccttcaaagttgctggtccagtaactttggtgcaggtccagaatttgcatttctagcaagttaccaggtgatgctgatgctgctggccttgatcatgctgtgaaaaccactgctttagctaggctataagaaaccatataacatggacaaggcaaatgaaaaggttggaattcttctgaatcccaacacatttgtgagcataaagtcgaagggaaaatgattcttctgaatccagacacatttgtttaaggataaactgttttttccttctgaaaatttaatgtctgattctcgttcattcattcatcaaaagttatcaactatcaactataggtaggaactgtgcaatatgctggtgataaagagatgaaagacacagcccctcccttcaaccagctcctagttgaggtggcaagtcagctgtataatcaagtaattgcaagactgtgcactgaaaagggtgaccacagggtgtgatggccacccagggctgtggaatcagtcccaaaatgaagaatgaaagcagggaagggtaattcagaaagaagaaacagttcgcataaagacccatagataaacatcaatcagatgtggttaagacaaaagtaagtttctggaggctgaggaccttctcagctatatgtttgcagtgcttggtatagggctttatgcatctacatggaagacagaaagggccacatcacagtggacaaggcaaatgagaaggaggcagtatcagaagatgagggtacaccggagatcctagttatatatgggcattgtgttcatctcaggagttactgagtaatgggaccttgactcaaatgaatctcaagtctgtttttgcctaatcttggttttaggactaggattagcatacaaccgcactaggagcctagttatacgaaaggctgcattgcggacctgatacagttcaatatacatactgtcaccttgcaaatagggttacgttagttctcaagactgccaatcctctgtgctctaatccttttggcttttttttttttttttttaactgtctcactctgtcatccaggtgaagtgccctgggatgatctaagctcactgaaacctccgcgtcccaggttcaggtgattctcatgccacagcctcccaagtagctgggattacaggtgctctggcgccaccaggccctgctaagttttgcatttttagtagagacagggtttcaccatgttgcccagactgatctcaaacgcctgacctcaagtgatctgcccgctttcctttggcttttaacactatagagcaagggtccccagccctggggccacagaccagtacaggtcagtgacctgttaggaaccggggccccacatcaggaggtgagctgcagggccgccagcattaccacttgagctccaccttctatcagctcagcagcggtattagattctcataggatcacgaaccctattgtgaactgtccacacgagggatctaggttgtgtgctccttatgagaatctaatgcctgaagatctgaggtgcaacagttttatccccaaaccatcgcctcccacgcacctctccccacaaccccacccgcccctgatccatggaaaaattgtcttcctctaaaccagtctctggtgccgaaaaggttggggattgctgctatagggcgatggttttcacatttgatcctgcatcaaaatttccaggtgactcattaaaatactgattgctgtgccccactcgtaggagttctgataaggtagctgtggggtgagacctgagaatttacttttctaataagttcccaggtcatgctgatattgctttgataaccaaagcaatatcagctttggttatcaatatataaccaaagccacatagagggggagaagttccttgggtttagcccagtgtttactgcgaccaccaaaattgctggagcttaaccatggctcagagagttatgttctgttcactctgtaggctgctattccctgtcaccttttgaactatgatggaggggaagagctgccagctcaggagatttcacttttttctctgcataattgaaaatccagaaacacagggttttgggaaagctatagaacagatcatcagtgatcagtgtttaataaagtaaagcaataaactttactgtgtaaaataggatactttattatataaattttgtccccttcccccacctcacaggccaataaaataatatacttcttgtccctgggtgtaatgttattggaaacctttgaatgtaggagaggcatgggcttgtaagttgcagaaaactgctagcctaggattgagaatttcatggataatccaaaaatagatgattttacagttataagccttacgtgaacttgaggtaagaaaacacaatgcctttatagtcttctcagttgctccacatgccctctgagattctgttctgcccagcctctctggttgtcacatctctgggcattaacagaaagttcacatactctttgtctctgatgataatccttctaggtccatatagaagatccctatccaaaccatcccccaaacaaacctattggttaaatattttctccaccgaaggcactttcttagattctaagtgccctgtaggcaggcttcctctctgatttgggagagtacaaattgcgacaaggttaaatcatagcctgggaatttgacctaaaattcactcttctcccatatgcattcatgaaccttctgctggtttttaaaagaagctacttaatgtcagctcgaagaggttggaaggggttaaaaacatgagcatggcagtaagaagatttatgaaggatctgagaagattatgacttgatcagatggtattttgtcagctagccacatttgtgaagacttgaaaactagggaggcttgtccttctaagagggggcactgctgggacctggattctgtggaaccgtattagtagaataaacaataacctttgcttgtatcaaatgaacttctattctcatgtgtcttttgacatatttttattaatcatatcactgggacctccttgctgaaagatatctccgttccccattctgatgactcccaactaggagtgagatcaaatgaagatggcatggaccatttctccatgtgacagctctctgtggttgccttttaacacttctaatgccctttctcttaagaattcccatttgtcgtctggcactggtgctgtgatcaataaaaatgtaatggagtgaggcttagaaacatgaggaaatttactcaagctatccatttattgatgtgtccatttgtgttgtcagggaagaaaaactttttcactcccctcttaggttcattacttggggggctgcaaattaaactgacgacagatagattggcaatagaaaagacaaagtttattcagagaagtatgtgggagctcacagaaaacatagctcaatgaagttagaatttggggcttatgtactattttaacaagggttttgaaaagaagagtgttagaatttcaagccacaaagttggtgggaaatatgaaagaaactaatgaaaggtaatgtttgttttagtaaagtctgtttatgtaattttcttttcccagcgacaacttctcatctctggtgacaggagtcactctttacccctggtgcaagaaactttccttaaaggaggatttaaaacagttgaattatttcagaaatctttgcttttaggcagatagggggagtacagaaaaagccccttcccgtatctgttgatcctcaaatggctttagctcaaaacaatttttacatcacgatggcataatgtagatctcttcaatgtgttcatttattccacagatatttgtgaagtacatgatatatgccaggtacttgggatacaagaatacataagtatgtccctagtctcgtagaacttacactctagtagtgagctagagaataaatgatattatttattatatgcatacacatatgatttcagatagtgatccatattggaaataaagctggttaagggaatagaaaatgatattgaaggtggacttgtttagattgggtggattggcatggcttctctagggggcagtatttgagcagatatgagagcagatattctccaatttgggcaaaaacattccaggcagaggaaacaagggcaagggcactgagttcaaaagagacttgacctagccaacaaatagcaaggattccagtgtaagagaaggtggggaaggaaggaggtgcaagtataggcaagggcaagatcacacgggatcttgcaggccgtgataaaagaatttaactctttcataattttgacaggacatcattgaagaatttagaaaaatagagtggagatacctgatctgctttcttcaaagagttcattcatcattgctgagtagaggttagactgaaatggaagcaatagtgaatacagggagatagcacaggaagccacgttactagtccacatcagaggtggttcagactagggtggagtggtggggtcagttagagagctggtatttaggatacattttaaagacaaagctgacaggatttgctgtgatgaattagatgtaaagtatgagaataattgagaattatttctaagttctttgctggggaaaagtggaggaggaaaaagttagggtacaaggtgtgatgaaatcaagagtctctcttattatcagagtctcattagatatccaagtggaaatgctggaaagaaagttgggtagatcagtctgaagctgaagacagatactgtgactggaataataacgtaagagttggccggacacagtggctcactcctataatcccagcactttgggaggccaggataggagaattacttgagcccaggagtccaagaccagcctgggtaacacagcgagacctcgcctctacacacacacacgcgcgcaaaaattaatcgggtgtggtggcacatgcctgtagtcccagatactcaggaggccgaggctgaaggatcacttgagcctgggaagtcaaggctgcagtgagccgtgatcacaccgctgcactccagcctgggcaacagagtgagaccctgtctcaaaataaataaataaataatgtggcagtcataggcccttagatggtttttaaagacatgggactggatgaagtcttctaggaggagagtttgggaaaagagcccgagaattgactgcacctttcaaaacaggaggaagaaaaaaaatactcaaaggagacaaaagcaacttctgtgatttatagagaaaaccaggcaagtgggatgaagaaagtccttcatgatagaatcaaaaacagtgtcaaatgttgaaaatacaattagacaaacacaaaagaatagaccattgggttttgcaatatggagctcatacttgaccttgataaaagacattttcactggaagcatgcatcaaaaaactatttgtggtaggttaaaatgtagtaggaggtgaggatatacagacagtggctttcactgtgcagatactgctgctcatgcactaattaaaagacatttgttgagtatctactatgttgtatccattgctaaatagtaacagctgggtttagtcaggtagaacagcatcaaaatcattatagtatcccaagataggtacagtaaaatctgtgaaggaatcagagtagtctcttctccaacagagcgtaagacccagcttcacggagaaggtggtagattagctcatctgggaggctgagtagaagcttgtcattatagagggagaacatcagaagtgtggacaacagcttgaataaccttgaaaggacaaaagaggacggtctgccctggaaatattaagaagtctcacatgattagacacaagatattaggggaaaggcataaggtgaattgagtcaatgaggtcaaagagaagctagctggaggaacaggcgatcataaaatgagtaaaagtatatattcaaagattctttttagaagggctacacaggatggataaggggagagagagagttgaggcacagagacaaattggaaaggtgcaatcataaccagagacatgaaaaacccatagaaatctgatgtagattatgtggtccccaaggttgaacaattaagtacgctttcagttgttatgcccatgatattaacatattttataactgcaataagtgctgaagctaaagataaatacaaacaatgtaattcttattctgtgagaaaatgttgtagctggaagttaaacatgtttcttagctaaagaaaaatattgtgtgatctggattacttaatgttataatttagcaacaaaatgttgacattgagccttgcataatcaaaaaagtagtctattcaataaccacattctcagaaaaaaaacaagaaaatattagaaacaatgataaattatcgtagtaatttaattcagtattctattgttttatttggatttaggaaaggcagaaatgttgaaatattaatatatatccctgtaataatataatttgtgtctgagaggtaggaatgagggcatgaggtcaaagtttgataatgaacttcaaagctataactatgatcaggaaattaaaattggacaataaattcctagaatcgtcaggagttgcttgtgaaatcgagaaaggaaaggatatacacaaaaataaagaacagccaatgctctcaaaggagtctaacttttataatagtcttctgtgttagagctgaactcttctggtttagaaggacactctgttgcctggaaatagggcatggaaaaagtcatcagagtcatgtcatctttcattcttcccatgaacgaaatcgaggccctgaaaagtcacctgtgtttgctgtattttattgcaactaagatgtgcatttttaaattgatacataataattgtacatatttgtgggatacatgtgatattttgatgcatgcataccatgtgtaattatcaaataaggatatttctgtatccgtcacctcaaacatttaccattgctttgtgttgggaacatttcacgtattttattatagctattttgaaatacaaaatagattgtcattaactatagtcaccctactggatgcaccttgtttttaatatttctgaaaacagatacgtctcataggtgatggtgtcacagctgtgcattagttattattgcctgtgcaggtgcaaacgtaactattcatattgttgtcaattaattaaatagttacatttatttatatgcgtttattatactaataaacacaatattgagatagttgagctctagttttgactctgctgttaactagctgcgttactttaatttacttaactaatttggctttcaaattcctgataagtaaaattacaacatgagtttctcctgctataatagcctgagaaatcggtgaaacacatgaattcagatgttgatgctatttaatagcgggattccagatatctacttgccattatgggagggagagaggaggtggactggaggctgtgatttccctaggaggttgttaaaattggccaggtgaggaaagctgagacagaccataaatatgaagcatgatacctagccctcagtgttgaaagaaaatcaaatctcatctttgtggtctaaatatcagtatgatacaatcctctgtgtagacatatcctctgccctattgttttctttctaaaagctaaagcccaggtgtgatcacatccctccgttatttacaaatttctgatgatgatgattcttctaatatctacattccttaccattaccatgatgtccaaaacctattataatctattcgtctccaagtgccatgttgtggtcaccctatgcaccctctaaacccaccatatgaccttcccgctgctacttgaatacagttggccctctacctcgttgtgtctttgcattgcctatttaattgcctttccattctctaaatcactctttcgctggaccagcaacatcagcaccatctgggaattcattagaaatatagatcctcaggcctcatctcagacctgcttgatcagaaacattggagagtggagatgagcagcctgtatttttatcagccctctaggtaatttgatgcacactaaagtttgagaaccactggtctagagcattcttctttaactctcttctaaaaattattagaatgaattcgagggacgggatctccttgaaagccaagaacatttctttgtcatctttctgacttcagggcgtagtacactttttggcccataattaaagctcgataaatgcattctatgccaataaatcagctaatcaaatatattattcatgcccttgaggtatctgaaatttgtttgcagaatgtaatatataactatagagtaacaagagaataatttattgccatagataataaaacaatatcctctgtataataaatcctagcctctgctcaatgggcaaaaacgggactggggtttcagattttaaaaagattattggtaattaaatcacctggagaagcacttgctgcagagatgggacttgaagcatcataataaactgttgtttattatgattcggtcagagctgatggaatcacagggattgtgtgaggtatggaaagtggttgacattgaattccaggctgcacagttgggacttgatatgataaccaaaaagaaagaatgtctggggtggtagcaagctctaaatttagacaatctaggcttatcctaaggagaatatagatacagataactgaagtttgattaaagggaacctggtgtatcacaaatagtaaaaagctgtagttagtctatgcagctatcagctagccacataatacttttgggcaaatacattataaaccaaaagaatgacatggcttatctctgtaacaaagtggctcattgttctttattctactgttatccttaagaaaaaaattttagtaaatttgttatgctatactcaacttcaagaagggatagcgcttataaaaaaattgtttaaagaaacaggcctatttctctttgggagaagccacggagaaacgaaaagaatggaacgtgtgtttctgcccagatggcaataaaatgtagggtaaatttctgtcttttaaaactgtattttttccatccctctgtatatacacatatcctaggactgttataaaatgctgcatgcgtatgtgaaaatggaaccttattgggctgtttgatggacctttaaaatatatttgttggtttggggtacatactagctatgcaatataatccgcattatttcttatgtaaacaatggataaactgtttcacagtccagacatttatttggtcactgtttgtagaatgtctattttatttacttctgaatttgtattccagagatctgccttcaatgttggatacttccactgtaatattctaggagatgctcactttctttttcagcatctgacacagtaccatctgcctcctcttttcttgccacaagtaataacaattttataaaggaggatcacattacagaattataggtggtaaactttctaccaccagatttacccaagaacctgaaacacattttttcaaaaggaaatagaatgtccttcttgtgactacatcggaattttgcttgcagcattatgctttttttttccccctagtgtagctagccatgtggaactgaagccattagccagctcctcatcctataaatgctattacctgggaaaagaggcagaaaatatactctcttctccagttagagtctaaaggaagagaacaatatgggtagttgtgtttaccacaaattgatagaactcctttattttaaatgctaaaaccaaataacttgtttatatgacttcaacattgactatcacacactgttgcatgataacagagtgaaaactacctctattggatttaagtggggaatctatgtctcattctcattctttttttactgtggaaactagttgattccaggatcagccttagctccaacttgccacactttgagttttggtttttcacttgcattgtcacaggaaacttctataggataaatcgaggaagattttactctgcaacgtgttgcagaattaaacatttaaagtggcaaaaccttcgtgtgtaggttgtctccccagagaatgtaaaaatgaattgaaggcagcacctaataggtaaacgacagccaatcaaacaagaacaaatgaaatttgactggcaaaatcaaattgaaaatgtataacgctgaatctcagaatataggaggatgcatagaaactaagctgtactattataaaagtcatagccattgaaaaataatgactggttaatttggttttctttacctcatggatgtgaatggttagattttgatgttggtgttatttgacgtgtgtttgtcaagaagttgccttagtcggctcgcatttaggataaaaaaaatattttaagaaatgtttaagagattatgttggagacattagaaacaaaataattatgcagagggcaggactatcaaaatataatagaaaaattacaccgctcttttatgatttcctcctttttggcatttaacacaaaactttatgattacacacaccacgcactccagaaatgcttaaaggaagatgagaggaaaattcaatagaagtagcaggcatttctgtgaggacagcagaatgatcacttcatctctgtattttttttttttcaaatttctgtatctgtacaatgtcttttccagctctaatattctgtgatttggtaatttccgcactcagattttctttaatgaattttgtatgatattacctatttttataccagatattacctggctctaatttctttttcaccctaggaaataaaagtatcgggtgaatttcccattttcttatgttattgatacaggtctctgttggatatccccacgattaactttcctgcagcatgttcgatggtggcttaaagaagaaaccatgtatcagagccccttgtctatatagacttttagataaagagaaatacatatcacagaattattctgggcgcatagagtctctaaatgcaaaaaaaaaattgtattgtagctgttgattcttctcagatagattgagtgtagagagagagcattccaaaaactgagcagaagaaacacagtctgaatcaaataacatgaaattttagctaacaagtaaataacacttttttcagaatatgcaaataatattggtttattatgaaaaatgtataggctgatagatgagcatagagaaaaaattataaatatcttctttaatatcactttccccagcaaaccacttttaacattttgatacattttcatgttcaaacatttcctaatagtcttttttcctgttatataaatatgaattttaaacattcgtatgtttatgaaaaggcaataagatactgctcttttataacaggctttctgaacttcacaacatgcagtgtattctaacatgctccttgtgttcttaactaataaaaaacctcacgttatttaaaaaaccatcttaaacataattatccattaagagaagaggttggggtagagagtttcagactatcaatatcaaagttatattttctgtaagtattttaatttttaagtgtagctataggtatatgattataaaaccaatagcagagaaaagataccacctttgaatatagttttccttggttccatgaaaatggcctcctttctttttgccagtccctcagtatcattaactcatttttctgtaaatgccatcattgtatcacatgtcctcaggaaaaggcacttttctcttttaagctagtgtttgttcttgttctaattttatggcaatttaacgagtaacaatcctgtttctataaatactgtttcctaattaatctattgcattctatccatgagaatttagatgactttctttgtaagagaaatctctgtagcatgagattcttctttgctcttaaatttcattctttcacatttttaaatgacctgatagtattttgttgtatttgtgctgattttttttaaccaatcttaccttgttgaacatgtaagttgtttctaatatttgcaatgatcaaaatgtggatccaacttcactaaagcgttaagaatctaaaacaaaacaaagaacaaaaagttggctgtcatcttgcttggaccaccccgtgagttactattttcttgtttccggtcacagttcatcctaaatcatttcagtacacaaaatgttttttaaagtttgggacagggggtagagaatgtcaattattcctccaaggcagtcatatgagcattgagtatcatgtggaatagttgttacttgtaaagttatggggcatcaaacccagtcaatatgtttctggaattgaaaaagtccctggacattctaatgatactgttgttcactttgcacctactgttaccactactttgatctgtcaacactgcccgtaatggttaattttgtgcatcaacttgactgggctacaaggtgcccagatatttggtcaaacattattctgggtgattctgtgcaagtgttatcagatgagattaacatttaaattggtagactgagtaaagtagattgcccttcctaatgtgagcagacttcatgtaattaattaaaggcctgaatagaagaaaaacactgaccctcccctgagcaaaagggaatcgttctgcccgactgccttcaaactgggacatgggctttttcctgccttcagactttaaccacaatattagctgttcttgtatctcaagtctgctctacttcgattggaactacactatcagctctctcgggtctccagcttgcttgttcaccctgtataccttgggagttgtcagtctccatagttgcctccataattgcatgagccaatttcttaccacatacaaacacacacagagacacacacacacacacacacacacacacacacacatataattatatatgtgtgtgtatacatattctcttattccttttgtttctctaaggaaccctaatatactccttattactctttctactgccttagagatcttcaaggccaagagcgtaatcctccatcctggctctttttcctaatcattaatgatcaactcatagccatttagctcaactaaaaataatttgttcatgaagctttacactcccacatactgaggaacgtggtacctaagatcaaacagtcactgcctcatcaaatgcattcctcttcaaccccatacaaatgtccccagatggaactcacaccataaaaatattagatcccattgacttttctgctttctcaaggatcattgcagagcttgaaaaagatggctcctccctttgcctaagcaggttaacttggtgtaaaagtacatgtaagatttggcacaaaggaaaataaatcagttttgcctgggtcctaagaaacatttccctctgcctcatggtaattgtacctgccagttgattgcattactcaagtggagaccatgaagtgaagtggtagaacaagaagaaatccctataattttattaagtatggtgaaaaatacagatatgtagagaaatgactgggattagatggagcaaaacataattcgagatcctgatacaaattgtacttcctggctcaagggagggagcagaacattccctgctacatgggaataataataaatgcctgataaaaatgcagatatatcatagactacagaagctgaagtggattcttatggtcccctactcagacagcctctccttcagatgaagaaactgaagcacagaaagctcatcctagtgtttcatattgaaaaacccattcaagtctattttaataacctgttaccaaaaatgagggaaataatttaactttaatgtttcactttgcattacccttttcctgactagacttctatccttttcttgagttgagctcattaactactatgaaattatggttatgggtagaggttaattttatacctgtccatcttctggcatcttatttacactaaaaatcatttttaaatggcttcattttaaaaaatattatttcagttgacattttaaaagacacatcatttatgtactacagaatatgcattttatactctcctttattaattttattattttccaggtagaccaatcaaatgaatcagaaattcttggttagatctattagacagcataagtatgtttttcatcattaaattaagatgaaaacacaattttactttaaagtgtttgacgtttccagcctttataaagtcaacacttaatcacatctgaaatttgcaggaaaaaattttgaaagccttcaattattaacattatttcgggagaaaaagccactttgccgcagaactttcacttttctctcgtgaattaagtctgatacaaattattcattatggtgaagtttaaacataatagagtctagctacttccacaaaaatactattcaatgagtttctacattgacatctaactgaccttgtaattaatgttgtacacgatccttttattatatgctggattatcaaatatgacttattagcagtataaagacacaaagttctgaaatgtaatttatagccatgaaaaggaactgagctttgtgtgacagttaaatttgaagagatcaggtgattattatgaagcatgaataataatgcatattaaactcacgtttttgtttaaatcattaatatgattgttttagaagaaagtctacctctatcatatgggcaataaaatgtgtataagagcaaacatttgtgtatgtgaaataactcaaattaaaaccagttttccacattaattcttacagtttttaaaatttaaatcatttaatgtatcacacatagctttattcattttaagctataaatgttacaatttctgtttaagctgttaatataagctttgtaagagcaattctgtataaatatagaattgtcattattcactaatagctaccatttatttagtgcttgttgagtgcaaaagtactgcactgagatctttgcatatgttctcttaatgttacaattcttacctgaggcatttctgtttctgctggaatatggtctctctgaattgaacaagggaggcatttttggttgttatgatgaaaggtggacactgctggcactaacgtgtgttggtaagcgactagactcttcatgatgcgtaaacagtgtttcctcatacccctgcacattcaaatagaggaaaaccttgtttatagttaatttcccctagaatgtaaatccatttaacatataaacacaaagcgtgttttgtgtggatgttttttactggagcagggagacaggagaggaaatgcagttttgatagttgctgaatttttcaagaatgcagcaattatagaacaatttctagaagtttcctaggagctcttttccatagcagaaaactaggacttaatagccttgcgactcatggtacttgagtgttccatacaactcacctatattcaggggacatttgaaaaattctacattaaaggggattcttaacataggcgcaagtgtctggcatcttcaataggtcttctggtgtggccatgaaaacattcacacgtttcaaagtattttaaaataaaataaaacatatattgttgtgttatgaattattttctttcttttttatatgatggttagatcactgtgcagacaagtttatgagatctattcatttcatttcagggtggtaaatgagggtgttactaaatgttggttctaaaaagggagacattgggtattacagaattcagaacagctctaagccctgtgcacatttagcattagaggacacaggcaaatctggcctccagtcctggcagcttcttcactatgtatatgatgttgggtgggttgctttacctctctagtttttacttttatttctaagctagggctattcatagttctttatcatgtggttactgtgaagtagcaaagcacctgacataattagagcagataaaatgctcaacaaatattgcttatcagaaggattatgtattacctcccgaaatacatcaaaaatatattttccaattcaaagaatatgtagtacaaaaatcatgcctaaattaacagagttgcagtagcccaaggagagaagataatcattattgatttcttcttcctttttgctaagcagttctctgtctctgcctcctcagttgttgtccatcccactcccccactcccaagccctgaactctgaggggtttgctgccgtggccggttctgtagtcattgctgtccaatgatgaaaacacaaaatactgcaacagaacactatgcctgtcagcttagctcccttctttctgctaaatgacactcaatcctattcttttgttctaaaggatatcctaaatgaatagccactggggggaaaaaaggttatataagattgtgcactgtgtgaaactgatgcaaccagatcaatgatgtgaatttctcttaactatttactgggatctagaaacaggtctctcaacttagcagtgtttacgaatataataggccttccttatacatacatctgaagccaatctgagtcaggaagagtcgtggtctgataaatattttgaaaacttgcatttgttctattaaagcaaactgtttattaatagtgtgccttattttttaaagcaaaacatttataaacagtagtcattacaggcacttcagtgtacggagtgatcaattgttagacctttaggaatcgattgtttcgtggagcttcggcttataattgaaatgtcatcagaaggagtgtaagacatagcttcaggagaggccatttatgcgcttttgttttcagctaagttatagagtcatcatgtgaagaaagattcttctcttagtaaaaatcctttaatggttggaataacacttgatatttaatatttctttctactttatatccacatttattcaagtgctaacgcgtgtggggcagcaatgaagcactttattccaacattatagttctcatatctgcgtatgattatttttcatttatcgttagcatatatataatgatgacttttaaagtacactgtattatattcactggaataatgattagctattaataatttgaacactatccaggaaattactgaacatgtcctacaagataaacctcgtatgatattgtctccaaataacagtgctaaccaagaagagtgctaccaagttcaaaagtaatcacagggagtaacctaaatgcagctccgttgggttaaaaatagtttctctaaattatatgttccctaagtttgagatcgatttctacaaggggataaaatgtttttataaattctcagtgataagtcatgtgattaagaacccccaactttttttccaaagacatttgcatctctgatcaaaataacaagatccagtcttagttataaattggggaattttcatcaaaataaggagctactcgttgcataagaagactagtacaacttaaagccaatttaatttcaatgaatgcatgatcagctccattgccaattgagtgtttttcttattcatcagaagatgggttcatcatcgtgtttcatatcaactgttctcaaaccatattgcccatttaaataaatatagatttgtctcgaaattctaaattcatgtcatatttcataaatagcctatggtcctatttattactttaaaatattatagatataatatttttattctaaagtaactgtgttatacaaccaaattattcatttaaatatgtgactttttaaataagtaaatgacttatttaagtaaagtcattaaaattttccagtctgtccttcatccacctgatctttgaatgagttaggaacaatacaggaaactaatacaaacttaattttgattacaaaagatgaaatcattctgttatttattcaacacactatgtgtcaataaaatcttatactgtgaaagaattcgtctaagtccatttgctgttgcttgtaacagaatacctgaaaatgggtaatttacaaagaaaaggagtttacttcttacagttacggaggctgagaagtccaaggttgaggggccacatctggtcagagccttctcccatccaagtactaaccaggtcgaacctcacttagcttccaagatcagataagagtgggcgcgtttaggctggtgtggctgtagacttgttagagcctttttgctcatggggacacagcagagccctgaggcagtgcaggacattacatggcaagaaggctgagtattctaatgtgttcatgtctctcttcctgttcttataaaatcatgaatcctactcccatgataacccattaacctattaatttatgaatggatgaatccattcataagggcagagccctcatgatgcaatcacctcttaaaggcacaatctcccggtgctgccacgttggggattaagtttccaacacatgaaatttgggggacacatttaaactatagcaaaattgtaataaaatgttatatagaagcaatgttcttactgattataattgttatattggtaaagtgttaagtcctctaaccaagggatatatttcagcttattataatagttttaaatttacaattcaatatgaataacatctggtaaaagttcttttcaagaaatgggaaaattagaaatgtttagaagaaaataattcaataaatattaagttcaaactggattcatagtttatgtgaaattctgggaaccaattgcaaggggagaaaatagttacaatagcaatggtgaggatgagaataagagcaggtatcaacgttaattgagggtgtgttatagttctaatcgtgctatgcccactacatgacttttccctgtgtgaggtttccgagcttcttcgtagtaatcctaaattgagctggagagaggctagggtaacttactcacgctcatagagccatagagtagtaaaacctgtatttgaactctggcctgtctgacatcattctgtggtcttttaaaccaccactgcttctccatattaaaactccaaatctaggtgaaaagaagaaaactcagaacatgttctgcaacaaaatataacaaaatataatgtatataaacacttatacataatatcactaatatctttactatgaaaagactctgatacgaacattttacataattcatgcagaagtgttaatcacattgtctgtgatgagctgtgtatgtatctgataaaattctggcaaccagacatcaactcgtaggcatagatctgtaacactaaatatttgcctcgagaaacttaaagaaataaagacaaatgaatgaataggaacatggaactgagtacaagataaaatcctcctaaagcaatcgatgtacttgctgctgcgttattgttctaagcaaaagaagcatggcgaagggagatgtgaagctaaaaacagaatgcttagaaggagatgatagcaggagggaagcaaagatgggaccaagctcccaaaaggcgggctttgaacaaacaaaacagaaagctaagcctttgacggatgcacgggatgcaagaaactttagtcaggaaagaggaggcgaagaaaaaccctccaaagaaaaggtgaacaatattttaataggcaaattgacagatagcaagagatatataccatgctatgttttctcattgcagctgaagacaaactggggttatttatgctttgaaaaagcgtaaatctaaaaaacaattgtggaggaagaagcgatgaaaacacgtgttaatacagaaaacatggctccaaggctttaaacttccttgtgagataaatgcatttacattttccgtagtagctaatatatatatatatacatatatatatatatatctgggaaaataatacacagtgattttctttctttttttcatctacttatgtgagaaaaaagtaggctatctgaaagcttttcagttaaatgaggaagaaagttaggtgatcttgtaaataatatatatgttcaagataatgtaaggcccttgtgtagttttcaaaacttatctttaatagcagtttcttctggggatggggtagttcaaagttgaaatgttagaaagatgttaactttttttcctttttacttctccctttcaggatggaattaacaaatttgattacaaatagatctcagagagaggcaaatgcattgaatccagaagtaacataaaattagatcatgtttagttatgcccgaggtcacatggtgataaaaatgaggataaactgaaattgtctgtgagccagattagtttattttatgccagtcctaggaaaaagacacatcatggtaggatacatcctttttttttttaattatactttaagttttagggtacatgtgcacagtgtgcaagttagttacatatgtatacctgtgccatgttggagtgctgcacccattaactcttcatttaacattaggtatatctcctaatgctgtccctcccccctccccccaccccacaacagttcccagggtgtgatgttccccttcctgtgtccatgtgttctcattgttccattcccacctaagagtgagaacatgcgctgtttggttttttgtccttgcgatagtttactgagaatgatgtattccagtttcatccatgtccctacaaaggacatgaactcatcattttttctggctgcatagtattccatggtgtatatgtgccacattttcttaatccagtctatcattgttggacatttgggttggttccaagtctttgctattgtgaatagagccgcaataaacatatgtgtgcacgtgtctttatagcagcatgatttatagtcctttgggtatatacccagtaatgggatggctgggtcaaatggtatttctagttctaggcccctgaggaatcgccacactgccttccacaatgaacagacacttctcaaaagaagacatttatgcagccaaaaaacacatgaaaaaatgctcaccatcactggccatcagagacatgcaaatcaaaaccacaatgagataccatctcacaccagttagaatggcaatcattaaaaagtcaggaaacaacaggtgctggagaggatggggagaaataggaacacttttacactgttggtgggattgtaaactagtacattcttaacatcaatttattcctaaaagcaatgttcatagggcacactgtaggccatagatttgcctcacaaatttaaaggcctaagccctcaacatgcacagcagtatactcagagactatttgtaaagatgacgattctggaactttttaatgaccccaatcattagcaatgattaaaattaatattcaacattctatatttaccaaggcaataaagtagactaatctattttaaaagggttttaaaatgaagagatgaaacaaaccaaatgattttgatttaaacttcatgaaaacataagttgcattaatcaggtgattttgttttatgagcattctgattgaagtgatcatatttagccccgggagaataagagaaggtaaagtatgggtatggcactgaatttactgagatgattatattgtttgagttaaagaacttgtattaagaaacaagtatgtgccaaacattgtgctaggagcaagcaatgctaaaattacatgggtagaaagagagaatgaaatatctagaatgagttagaaacatcagtgttttccaatgtggagccctgacttcacatgaaaattctcattttcaaacaaggtagtttatgaaaactggactattagcaagacagggtgggcatgccatcagtatagtacctggtgtaaaactagaaattttaatcatttgtgctttcattttataatcagtaaaatccaaggtaggacaaacttttactttttctgtataatggactgatatttgaattatacccaactttaattttttgccagaaattatgctttattgtttctctaaaatggtactatagatctttatttatttctatatatttatatgatttttacatatatgtgcatttacatgtatatacatccataaactatatacatatatacacataaattacaaatatgtgtacctacgtacatatatatgcatatatcacgcaaatacaggcacattttcaatacccctttttgatttttttccttgaagagcatagcatctgaatttattatggatttatttttaatttatggtcatgttctttgagtgcttttggtgtttatctggttgccccaaactcgctagcattgtaaagaagatgtgcaaagcctgaatctagactgactttcatattgactttattagtcaaaaaaagtagatgaaaatgtaacagtccgtgttaaaaatgggaataagacagatgttcaagccctagcttcagcagtttttagctgagatttactggaagaaaacattttctgaactgtaaaacatgcaaaatgcctacgtgacagacttcattaacattattaaatgctatgatatagtaaaagaatttgtaaactgtcaagtgctttgtcaacattaggaatttagttattataggtatttccatatacatgttgtatttagaattccctttaattttatacttagggttgatttgtattttaactaagtcactttatatatctggtcccattatacaagtatacttttccttaggataagaaagtgatctttatatatgtttatcaacccaaatgcccatcagtgatggactggataaagaaaaggtggcacatacacaccatggaatactatgaatccataaaaaagaacgagttcatgtcctttgaagggacatggataaagctggaagccatcatcctcagcaaactaacacaggaatggaaaaacagacaccgcattttctcactcataattgggagttgagcaatgagaacacatggacaccgggaggggaacatcacacaccgaggcctgtcgcgaggtggggggcaaggggagggagagcattaggacaaatacctaatgcatgcggggcttaaaacctaaatgacgggttcataggtgcagcaaaccactatggcacatgtgtacctatgtaacaaatctgcacgttctgcacatgtttcccagaacttaaaatttaaaaaactttaaaaaaagaactgtagatactgatccaaaaaaaatgttcattaatgggggttaaatgattatttctaagtagactactcttgaacccttgaatctttaagaattttctttgctattgaagccattcaaactctattttattaaagctgtcgttattctagtagattttaaacagtaatacctgaatacattagaaatatgcaaatctgcattacatatggcatctgcagagcagaggagtttggtcatctggactcatgctaaagtctccgaaaaatccgcttgtcttaatgatggttgactcgctaatgctatgcgtatatagtcttattttaagtgattgaatgatgtggctaataacccctctgttagatgcactcagaacctcacctacctgggtcctcagctctccagtgaaatctctactttaagtttattttctaacatggtaagagccttcagtttatgttatgctcaggcccgtcactgtgaataaaatattagaaatggactttttttttttgtatttttttaatggatcccttggaactttaaaaaaattatttatttgagctttctactgttatcacagtgtctcctaagcatggcctcccgttttttgttggtaatataattcttacgttattcaaattagtaaccattatttttctcatggctagaattctggaaactattaggaaatcactgagcataattgaatggctgtttatttgaagagctatgtcaaggcagcatagagttgtattttcttgcaggggctctggagtcaaagagcctgggttcaaaccttggctccaccactttctatctgtggggcattgggcgtgttacatttgtgaaacttttgtttctccatttgtaaagtgaggtttgggggatgattaaaccagataactcatgtgaaatatttaatggaaatgtatttggtaggggatttattatttttaaatttggattgcacatgacacatgtcagggatcatgctatgcattttggatagaaagatggctaagatatcatgcctgactcttaaaaacttacctaatggtaaatgacgagttaatgggtgcagcacaccaacatggcacatgtatacgtgtgtaactaacctgcatgttgtgcacatgaaccctaaaacttaaagtataataaaaaaaaaaacttataatcaactgtagtagaaagagatctgaatggcttgccatttagctaggcacatggtatatgtgcttaattcatactagcagccactacagttgtcatgattaataatgagcttccaactgcacagaatgcttttaatccatagaaaatcaaatcagaaacaagtttttgtaaaattaatgtgaaaggagcaacaattaaaatgcaagattgacatttattttctaaattggttctattttctttcacatttacaaaatttataagaaaattctttatttctatgtgatataaagaactagaatgtactttgatgtgaattattgttgccagtgctgttcaacttttatccataatttactaagcacctacatttagacaaaggcattatccatccctttggggaggatttcagatgattcatacacagacctggtctcgaggaatttaagattttctttggggagggaaataaggactttaaccaactcaagagtacttagagaattttctgaaaataattttatcaatgaaaacttgttatattaaaagaaactgtcattctgacttccacaaatctaggcttgaaactatggataacgagatattttctattactctcactcacgtcattttcacaaagtgaaaaggtacattttaactagtgaaagaatagaggaaatggaagtagctcgaggcagtggacgatgattcaaaaagacagggccctattatttgatcaagttatgcaacgactctgggcctgtttcttcacctctggaaggaggaataatctccaagccctttcagactcttttggtaattcacctccagcacatcttctaaatgccagcattaactgtcctctgatttgtctcatgtttttctagccccatgctctcctgttcgccatttaccctcatgcaaggtacaaattacacccatcatcacaagacacttgctcaagtcccattgcccccttgaagacctgccacacctactctctcaaaaaccatcatttcctgaaagtcctatacagctcatttggtatttacagtgtactgccacaagccactaagcatcgttttgtgaatacatgacttacagacttagcttgagtaaagatacttgaaaatgaacaccatttcttggctatcttcctattttgatgtacccttcaggcctatgaattttagtataatagataaccaataattatttcttggttctttcctgcacatctgaataaccctatgcaaagtgatagaatgtttttctataaggaggtcctacactggagattgtgtatttcttaatgctgttgaaggaagagatgtgtatctaaaataaatagactctaacaaacattaatttatatttctattatctgttttgtgtattgagatatctcacaaaaataactaaacattttggcattattgatattacatatttgccatgaatatttgtaaatgaagaaaaatatatatacatcagtaattatcttggcaaactcttcaattatgcaatattgttacatagattacatatctaagtgaacactggagttttaacaatattgtgtgttcataaatgttttatttattattgccactaattcttattgccatttcaagaactatgtataagttgttctaaaaactattaaagtataggtgaccatggtcactactgcctactttggtaaaggccaaatatgtgaagactttttaatgtgttaacaaacgttgaaggttttttaacctgttaacaatcagtaggactcttgaaattatttcctaagagagtaaattttacaacttgcaaagcatgattaacctcttgtaattataaaccatctcttgtagttatgtagcattttgttaatgagcaaagaaccattgtggttcctttttacatttcttaaaataattctccgtaacctcattgatatctccagtaaatttagataagcttttttttttaaaggagggttaaaatgacattttaaactaatttttcttgttagttatacagagttgaactatctgagggttttattgacagtcataaaaaatttgttattttctgtgaaatatagagaatttaattcattatcatattattaattctgtgggccattgtcttaattctagaggcacaagctgttttcatcccactgaaatagaggaatcaaagtatgttccttgctcaaagcacaaaagtgacatactacatagtatgcttcttgagtagtcgtaaatctcatgtgttaaattacatcccaaagatttcagtatgttttatgactttaataatttatggtaatttctaatctggcctttgttgacctgtcttgctttttaaatttttagtttttcgacaaaataattaacatattttaataatcttccaaaggtgtttaaaatggcattgtatagagatagctgaaggcttttgagcttctgtgttgtaaacactttcttaataaaacatgaattgctaccagatgatccagcaatcccactactgggcatttatccaaagaaaaggaaatcagtatctttgaagagatagctttgttcccatgtttactgcagcacttttcatactagccatgatatggaatcaacctaaacgtccatcagtggatgaattgaaaagaaaatgtggtatgaaacagaaattgctgctttaatttatattaaacacactcatattcttctcagctgttaagtattgagttatagatttaaagaattctattgtgaagactaaagtgactattaaagtaagaaattattttttccattatatttaacttatttcatactttaatgttagcgccaatgagcaagactattgaatacaaaaactaattaagtagtggtgatagtacagtatataagggagaacattcttttagaaaggaacaataacagggagcaatagaaacaatgaatgagtgtaaggtcacttagtgttaaaacagctaaaatatagtacaaataagttgcgttttaatagtgattttatataattacaccttgatgttttatttgttacaagaattgtccaggaagatttctctaaagaccaaaggcactcttcccctaaataactccaaagccagtcctgtgtttctataaaaaaaaaaaaaaaaaaaaaaaaaaaaaaaaagtgaaaataacgtgatgaacatttttgaggaagtataaaaccaaaatactccactgcatagctgtttctgcaggtattgtattgatatattacattattcagctttggagtctccacatccaatgttacatcatcactctaaattaaacatgtatagataaatgaaataaatgagatagcatatgaaaatctcatagcccagcccctgcactatttaaaatagaaataccaaagaattgtattcctcatctgaaagctatttagtggtggtgtttcaaataaaaattccatctactgctgttgcttccattgtatctttttctctgcggtactgaaagagaaagagacccagaaggggccttgtctgaagtgtccctcttttaagctgttgctgctttaagcacagggtggacaaatgtaataggagtttcataaaggtggaataaaccagcggattacggtgtgggtgaatactttcagatgttaaccaggagctctgcttgcatgctgggagttgcccatgcctcttctagattgaggcacattatcatgcacaacctaactccaagaaatcttttaaaccactggaaattgaacccagaacatgtctctaagccagccttttcatcctgacaccgaatcatagcatgagccagtctgtcagggatgctgctgctctctaggcaaattttaaatgttgaaataatgaatcatgttttcttgaaaaccatgtacaccaaagaaaagttagtcattttatagatgatgaatattaacattttcttagacaatctgataaattatcagatctcacttttggctctttttaagacagttatgcctcagaaatattaataaacccccaagcccttatactgatcagtatgttcactactagctatgagaaattcttgaagttcttgtaattattgtattatttccttactttcattttattagtatgtgaataatatttttaaaaattctagtgtatgtcttgtatatattttaacaacatgacttttaattaatgtcttgataacatttcttctagtgtatgttttcagtaacatgattattaactgtaactttaaaaacctgtggattagatgggaccattttaaaatgttttaaacctggaaaatctgatggctttaggtttagttcaagctatagatcacctgtggagaatggaactgccaaaaaaaaaaatagctgtagcagccctttgagtattctaaaatagggatgttatccagagcattggtttctaaagcttccattatttattgatgttgagctttcaggatttagctacaatatttactcaacatctaagccatgcttttttatcagtcatgttttatatcttttataatcaaactgcttatcactgaaaaaaatatataagtttctatgtatctggaagaattctctggtgtttcttagatatggattttgatgtgtggaataagaattcaattcaaggataacagagatgttgtcctgaaaaaaatcgaagaaaatcagcttttctttaacattctgtcaaagctcctgactattagtttatcagcactgttttgccaaaggtgtcttctcttctcttctttgaaaaaaatcatctgctgctgctacgccgcaagtgtgttcccgctgtgcctgagaagatgtgtggcataaaaaaatgggcatggcctgagttaaaagtgctacatttaagccagagctggcttatttattagttgtctaatcataggaaaatgacagagcatgcttttctcttgcaatatccgttgctgaaaattaaacacatgagcagagctttcagagaggttgactggcctctcagacagcacctcataggatggcctgtgttgaagcatctcctttaaccagggtctgtccctcagcattgggttggctcacctagattggattgtcccagcagaaaaaaaaaacccaaaattcagaatcatatccaaaccggaatactctttcattcacattacttgtactaccttttcagaaactggatacctgagtgtgtgagggtaacttagaaacttatctcatggttagaagttttagaattagagagcgatgatcatgaaacggacttcatgatcagaagcaatggagcaaggaatgagatgtctttgaggagtatttccctgaggctgtggataacgctgacgaataatccccaccttaaaagtgggttgaccactctagtagctgtaaggtgggagggttctttcttcagagataaatctgtgctcttcacttgcccatttcccaggttttcatgtaggtagaagaaacacctgtaatctgaagacactcttccttcagctttgttagtgacagggatttaaatatgtctttcacacattttccttagatagttaaatttcacttttcctgtttgtttttctctgaaggtattctaactcccctcctaatggacttctagagctttctaattctatgcaatttctgttgatttgttctggtaaactttgaaggtaatctctgattcaacttcttggagattctatcatgtcatctctgtttattaactttatgttactcatggtttcttgatgaggactcattaaacataatgtaagtagaaaattattaactacataatatttactacgggttgttatttctgatagtagctagctgtaagattccaattgttcttcaaatctttgtctcagtgatctctgtgtagttcttgactacttcaaataacttcctagaaggatagggatttaataatctcttaataggaacacttaacacactgctggtgggaacgtaaattagttcggtcgttgaaagcagtgtggtgatttctcaaataacttacaaaagaattaccatttgacccagcaatcccattattgggcatatacccagaggaatagaaatcattctaccataaagacatatgcacgttgtgtatgttcattgcaacactactcacaatagcaaagacatggattcaacttaaatgcctatcaatgaacagactgaataaagaaaatgtggtacatatacaccatggaatactatgtggccatgaaaaagaatgagatcatgtcctttgcagcgacatggatggagccagtggccattatccttagcaaacttatatggaaacagaaaaccaaatactgcgtgttctcacttataaatggaagctaaatgatgagaacatatggacacaaagaggggaataacacacactggggcctactggagggtggaacacaagtggagggagaagatcaggaaaaataattattgggtactatgtttagtacctgcgtgagaaaataatctttacaccaaacccccgcaaaatgcagttcacctgtatagcaaacctgcacgtgtacccctgaacctaatttaaaagttataaaataaacgtatcttattttcagtacaatacaccacagagtagaagggttaaaagagattgcttctgaggaggtgagatgggggtaaggacagcacaagagcattttggggggtgatgaagctgttctgtgtcttgcctgcgatgatggctacacgactaagcccttgtcagaactcacagaactttacttcaaaaggagcggattttactacacatcaattccaataacaaatactttgtctttaagcaaagggatacctaaatatagcgtattgaatggatctccagaaaaacacatttttcagttcatgtttcagcctaggcctcatctcatccaggaaaccttgtcttgcttgcctttacatacatgtggcaatcagtagtttcttttagggctcggactgaacactcaatgaacttcaatcttagcgcttgtcgtagcagattgacatggtttatttatatgtgtcattctctgtagtaaaaggaaaggatcaaggccattcacttttgtagtgattgtgcatggcagtatttggcacatagtagattattaattatggaacttctgttttcacacacacacacacacacacacacacacacacttcagagctattttcatttaaatatttgctttagtctccaaagcccctctgcctcaacaccaacccttctatctcattattcatcagcttttctcctattacgaaactacttaggaaagcccacttatttagcttatgatggcaaaaataaatatttgtacttttttttttttttttagtcatcgcttcatagaacagcctctgtcctctgcttatgccatgtctgaatatatgctggaggtaaaaagagttcctggttgagagcttcaatttgagaaactatctgagattactttccaggttccaccgtggaacctgtctgaccttgaacaaatgacctcgaacaagtggctgaaatctcttctatttcgtcaactgtaaaatgggggaaaaccatgtctatctcatggggttcatgtgaaggttaagaaattgcttattcagtgtttagcacagtgcctgatatgcataaagctcctaggaatattagctgttattgtatttccttaaagaagcccatagctctatatgccctttcattatatgttttagtagcccaatttaacatatggataaaatatttttaagttaaatgatttgctaatggattgttgaacgagtggcagacacccatattatagacgaaggtcaagtccataacatacagtacatttccccactttcatttcccattaccaaaattcattattctcctgagaaactcattatagaattcatgtcagattcatctgtgtgttcccagcagtgccttatatccagaaataacactgagtcattgtctagatgtagcagaggtggaatcctccaaagagaagcctcagagtggccaggtttgccaagtatagggatgccttgattactggccttactctttatgctcgtgaattcctaagttttattcctcctgtagtcatagattggcttttaagctacaagctgaagagagagaaaacctcttccacctcgttggaatatgtctcttcaatccatttgagccaatttaggacatgagactgctcttagtctagaaccagtcatcaggagaattccaggtctgattgactcggactagcgggtcaatatcagggcaaaaattccaacgcacaacacgatgtatcagtaaggagaacctcaaaattatttcttaacgtccagatcatgttcctatttttatatatctattttctcacataagtcattaaaatgatgtacctgtgcgggtcctttaatgatactcaaagatcttgaattataggctaataactaacttaataagctgcagaaattaacatttctgctacgtttatgtagcattttcccacatgtacttcagaggcttgagaaaagaccctgaaataatgactgaataacagctttactcacttaatttcaaatttgttaattcttctgggaaataccgtcaacatccattttattatttttctcaattacatgtacgtttctacatcagtggataagttaaggagaagaattccctcatgataattttttcatgctcgaaaattttgaatcaattttttattttacattatactctttcctagtcattagaaagggagtggtggttaagataggcaagaatgctttataaggatactactctcgtttcaattcttaacatcaaaaaccttaacagtgtgtagactataaaataaaatatctagggatcagagcattgtgctgaactttgcaggttttttagtcaataatatatatgacgtgttcacagaattctttgtcaacaaagtacttttggagctccaggccatttaagttggtttttgtactttttctttttcttcggaagactttttttgttctatttacctggaagtgtttcttttttggtactgtgaattaaaatgagaccaatctactaggcaggaaaaaaccttaattagattgttgacacagacaaataagaatgtcaattagcatctactgtcacatgcctctccagactgcttctaggatgagtggcctcaagcagctacatcatctttatactcctaaagcatcaaggaaacttggagtgacaattcatatcatgaacacatccacagtgatgatgattgtgcttcttcccccccacccaacaacaaaggatgaatgccaattaatgtattcagttttttgcgtcaaaggctggatcacttgtgcaatgagggtaatcatcctgaccagacaggccatacaatccatattgtgtgaattaaagataatatgcgtgaaacaccttactctggatgtggttcatagcagtagcaaaaagatgaaaactatggtatgctaacattttagagatctgtactctattttaaataattttataaaagtgcatatacaataaaaagtgcacgtatcacaagtatatgcctcaaaatctaaagccagtcatgtaatcagcatccacttcaagaaagaaaacaaaacagtacccctggttcctctttgcaatcattagtctcccaagagtaatcaccgatctgatctgtgacagcatagattggttttgccctactatatttttgctgaattatacaatatatgctctttaatgtctggcttcttagtgcattgtatttgtgtatcagctattctcttgtgtgtagttattaaacaatcattttatgggctgcataatattccatagggtaaatataacagttttattgataacttagctattacaaatagtgctgttgcagacatatattctattacatgtcttttggtataagaatttacacatttcacatgggtgtatacccagaactgagattgctaaatattggggcacattgtatacattttgatttagtagataagatattgccagatatcgtaaatgcacagtttgataaatatagagatttatactttttctagagaaaagccatcaatatcagtgtatgtgtatatatatacgcgtgtgtatatatacgtatatatatacgcgtgtgtatatatacgtatatatacacacatatatatacgtatatatgtgtatatatatacgtatatatatacacatatatacatatatgtgtgtgtgtatatatatatatgaaacaactcagaagcagaaagataccccatgttctcacttataagtgaaagacaaataatgtataaacatgtacacatggacatagagtgtgtagtgataagcattggagactgaagtgtgggggtgtgcaagggaatcagtgataaattaatggctacaatgtacataatttgggtgatggatacactaaaaatccaaagttcaccactatccaacatactcacataataaaattgcacttgtaccccttacattcatacaaataaaaaattatttaaataaaaataaatatgtgtatatgtatgcatacatacatatgcatatacatatgtgtttgtgtgtgtgtatataacttacacttaaaataagcatggatgctgcaatgaatgctcaatttacaagggttgtccatccaaacttgtggcaagtatctcacctctcaagttgttttcttttttcttcatatatttcttgcttttgtctaggaaggaataatttggcttgcctttcaagagtgtacagtcagcatgataacccaaacacttaagacacgtgctaacccatgtggatcccttgagagaaggaaaacagtggtccttttactgggcagatagagcccggggccaggtttcgtggcttgaagatttcagcttctctgcgcctctcagctcagtgcctctggaagcaatttacaacttgtgaggccatactcaaaggccctgttattaattccccgccttccgagaccccatttcagaggatctcaattgctctcagagtgaatttactgtttcctgaattccgtaatcccaatagcaggtctgttgtcctcattagatagcttaagttagagtcggcagtgtaattggcaactgagctactaagtatccaatgcttatgtggaaaatatgttccctattgcaaacaactgatattcatattcaatttggcaccatcatctatctataaagcagatactacttgtgtttattaagttttatcccaaataattattttagtaataatgcttgaaaataggccttggtcatttgcatgtctgtatatggcatatcctgagtctttgtatgtattagaaagatcactcgttttgacttgatggtttaataaaagatgtccctcactttgggcagagacatttgaaaaaggcactccaaccagggacctaagaggtgaatgagatgcagctctgaatcaggtcacacggcctcaggaaggaaacatcttggttttcacatccctcacttctcgatgtcatgtgcaatacacaaatgacccctcaacacacacacaggcacatacacaaacacacactcactcactcactgtattgtctctttccttgactaagtccttcttactaactcaagctctaaagcttttttacttacctaaggtgagtgtgtgaggatttgaggtttcaatattaaaattcagaaacatttaaagttcattttaaatattagtaaaaaaaaatcttgacaaaatacaattatagacaaaaagaaaattcagaatatttggaatttaaggttgaggttacagccctatttatgaaatattagaagaaaaatgctggagagaataaagcaggtttatgagtctgatagaaagcataaccagatgattatgcatatatttgcatatgcaaagctttctaggcaatctgaacatttaaacctacaaatgtggctgcgatgaacagccacagaagagcaggctagaacagaagaggaggctagaacagaagagcaggcagaagttgtaaatgaaatgttaattttcaatggttgatctcccaagtactggaacagatttgtgctgttttcaaggttttggttcaaagaatccagtagtgtattgaattgttttgtggcacttccctgttattttgctttgtaagctacctcaatccatgaagtggctatgagccccttatacaacactgttgatttttttttccttatctacgcaaaagatttttgattcagggccaggcatggtggctcacgcctgtaatcccagcactttgggaggccgaggcaggcggatcatgaggtcaggagatagagaccatcctggctaacacggtgaaaacccacctctactacaaatacaaaaaatcagccgggcgtagtggcatgtgccggtagtcccagctactcgggaggctgaggcaggagaatcacttgaacccggtagccgagatcctgccactccactccagcctgggcgacagagccagactccatctcaaaaaaagaaaaaaaaaaaagattttttattcaggtggctatcagactcattaaatagaagccttaggttaagttcacgggttgctagttggaagcctccatggactatgttcataaaataatagaaaggagttatgcaggacttcttgaaatgttatttaaaaagtcagaataggctttctattacttgtctgaggtcaaatacatgtagtgctttctgaccatttcatccagggtgttagctaggacaataagaggtgcttaaaaattattagattgagtaaatgagaaagcccttagaaacataggaacagaatgacccttgctttggatctaatattgactcccacgcctaaatccctttggagaactcctttattttctcttccatcaagagcaggtataaattaaaaacaccattaaaggggccatctagctcagctgaagctttcatcacacatgtaggggaggtatggttgggagggatctttttatcctttaggtcttcaatttacataggacttttgaataatcaaatagccccaaagagctgatcttaggactagttgtaattgagactatttctccatggggtagaaaaatctagttgtaggaaaactgagaagtagatgtatgttaacctcaaaggctgttttttacaaaggatgttaaagcatcatctttgctcagaaagggagcaataaaacaaatgagtggaaataacaaaaggaaataatggccaggtgcagtgcctcacactagtaatcccaacactggggggctgtggtgtaaggatcgcttgaggctagcagttcaagaccagcctgagtaaaataggcctcatctctacaaaatagatagatagatagatagatagatagatagatagatagatagatagccgggcgaggtagtgtgcccctgtagccccagctactcaggaggctgagatgggagaatcgtttgagcccatgaggtcaagtctatggtgagctgtgctccctcctgccactgcactccagcctgggtgacagagtgagatcctgtctcgaaaacaaaaggcatactttttagatgtaatggaatagagtacttccaaacctggctgcctgctggagttgtattggaagaggttgcacgacttcagtggagatggcctagatgcctgctcagcagtcatctagttaaagcaactaagaacatgtaatatgaaactgcaaaaagagatcgtgtacgtaaaatcactctgggctcctcagatagagtaataaacacaactcctgacagccaaataaaaagagaaataatacagcccttgacttccttggttgctttgacatactaagtaggtgttacaggttgggttctctgggaaacagactctaaaacatttttatttttactttatttgttgttattattattattattattattttagacagaattttgctctcgttgtccatgttggagtgtaatggcacaatctcgtctcactgtaatttccgccttatgggttcaagtgattcttctgcctcaaactcccaagtatctgggattacaggcaagtactaccacgcctggctaattttgtatttttagtagagacggggtttcatcatgttggtcaggctggtctcaaacacccgacctcaggtgatccacccacttctgcctcccaaagtgctgggattacaggcgtgagccactacgcccggccagactctaaaataaagtttaatatgcagaatacttatcagggaatgcccactggaccaatacatattcaagagagggcttagaagcaggattggacagaaagagaagttgagctgtaatgcaggcccaataacagccttagtgttaagcaggctgagagattcagcagttaatgagacagtcaacccaaacagttttataggcatcaaaagtatgatcagcatggtgtcagtttcctgtgtcacttgtcccacagtatgataccaaaattaaagagaccagatgacatgcaacacaagcagtgtgcactctgttgttgagaagccaatttcgtcatgcaattaagcagttttatactctgcagctgtactttaaggggagctgagatggaacatcatatgtctcaccataaccagaaaggcagatgagaaatgttctatcgccacctcccacaaggtaagggacttccctaaagatacagaggtgggtggaatattgccttggtagacttcctctcaagactgcctatcttcccatgttggaaggatcacagagcatttgtcaagacgtgggtcaatctgcagttgaactttgtgtatgtggcctatgtggatacttataatatcattgggcacctccatagagctgtttcccaattgaccaaacatatgggaagcttcagagcttcgaatgacccttcagagtagtcctgagaacagtgagccttactactcctgcattaatcagtcattggatgatagccttctcagaaataagtcatgaccttgtgcaagggggctcttcatggctgggaccacccctaaaactgagagctgaaggctgtctgccaccagcccttccacctgctgggacaagttctttattgaagggaaatctgagtagttcatcagcgtccatcacagtagtcaagccgttcattcttccttcttatgacaacattgtgcttattgttatgtaatccctttccagaacattttaggttaagttttaaaaataatgcatataaatagacaattcaaatactggggaaaaaaagcttgcacttatattgttatagaaatgtgcacacttaaagagctgatttcttctgggtatttacataactttatttaaaaatccatccatttttaattagctgtttttaatatgcagttagctaagatattataagccatatattaggctaatggacatttaacagcttagttaagttcttttaatggaaatgctgacaaacctttgtctgtaattatagcaacactgtgattacagaaggaggtgcctctccttgttgtttgcagccctaaaattccatgtggctataagtaacaaagtccattattagataaacacaagtcatacttggcattacttgcattactcgtctccttgctttatttgaatcattttttaaagttgtaaaatgtttttcaaaactcagaatagtggccagttaataatatgattcctcttatattatgagattttaaaaaatagttcaccagtttctggtggcctctatacccattggcaagtcctagccattgtgaattaagtaaacaattctttatggaaattttttaatccttaaaccctataagtttttattcatcatgtcaggtcacttgtcaaagggtttaacattcagaattcaacaaaagtttatcaaacacctattacaggacgtgcaattttgggcgcactgggatttcagcaattaacaatcaagatatgatttgtatcgacatggatattacattctctcacaggagacagaaaacaaaataactagaaaatatacataaagagactttaaaatggggtaaaattacagattgtgacaggatgaccactttggttcagaatatctaggacatttttttctttttttttcccctccctccctctttcttttttttctttttctttttctttcttttctttctttttctttctgcctttcggagtcttgctctgttgcccaggctggagcgcagtggtgcaatctcagctcactgcaacctctgcctcccatgttcaagcttttcgtgtgcctccgcctcccaaataactgggactagaggcatgcaccaccaggcccagctgatttttgtatttttagtagagatggggtttgaccatgttgcccaggctggtctcaaacttctgacctcaagcgatccacccgcctcagcctcccaaagtgctgggatttacaggcgtgacccaccaggcccaagcaaggacatttttttctgagccatgttatttaaacagagatctgaatgacaagaaggggccagctctgtgatgtaggggaagaaaaatatgttccttctacccttctaggctgcccagctggagtcctacaaagttagagtgacaaaagacagattaacaagaggaaaagcctagaagtttattaaaatattcagtgcacatacacctggtagaaactcagtgatgagtaactcaaaggggtggttagaatgttgggtttatatagcatctgaacaaagaacagtaaacttgtagagaaatgacaaaacaaagaaaaaaggggtttaggtatttagggttgccaaactgtaggaaggtaaatatatgggagaaacatggagtatagtttgtttatgccaagtctatcttgagatcaacttttcgtattcttcatggccataacaatttcccaggagagagggcttatagcagttatcatttctcagaagtttctgcttttatttagacaagggaagcactgggaaggcttctttttgcttatattgattcttacttgcctctaactaaaagtaatctttatgtcaaagtgccatattttggagtggtatatattgatctcctataataacaatcaaaaggaacagtattctaggcaggagtaccactaatgcatagtgtttggtgtaaagacaagttaacatattcatggggcaacaacaacaataagccaatatggctaagacattgaggatgagtgagttggagaagtaggcaatggccagctcatataaagacttgttcgtttttataaattgtttagattttattgtaattatggtggcaagtgattggagagtattagcttcactttgactggcttatcgaaaacggaatgtagggggtgaaagtggaataaaaagaccagtcattaattgagtagtccgtgtgagagatgatagtggcttggacaaggacgattgtactggagagattgaagcgactgatttcagatttgtagtcaacaaggcttaattggtaggagaaaaaaataaatcagtgttaactctttaatgtttaacttgaataattatgatgagggtattaccatttattgagatgtagaatattataaagtaagagcagatttgttcaaaaagtatcaagaatctttatttggacatgctagtttggggatgcttattagagaccctaggaaactgaatataaatgtggattttagagaagagcttagggctggcagatgcacattaaggatctgtctagagccatggcgctagagacctccaggagaacataaatagtctcaagatcaagccctgagacactcagatgtttagaagtggaacagaagagggacatccaatatagaataccaagaattaggaggggaatcaagagagtgtggcaatatgaaagatacaaaaagagtgttgaagggagggagtaattaataaccagcatgttatgaggggctcagtataatgaaaagataagtgactattggatttggcaacatataattttttggtgatctggacaagagcaatttgaacagaatgatggatatggaaggtccagaggagtaggctgagtaaataatataaggtgggaaaatagatacaaagattatagacaactttttcaagaagttttactgtgaaggggcacagcaagctgagacagtgaggataaataatagactcaaggatggtaactttagaataagaaatttcaatctgatgggatttaagtgttagcaaggaagctttaagaagttattttccccattagaatgatctgaaaaatgttttagaacattcctcttatattctattttatcacatttatataactttcagagaattgaaagaggtattaagttattatgaaattttctgagattaataagataacaattataggatgttttcttttagttgaaatacacctactcagcctaatttttataacttcttactgaagtataatatacttcagtagaaaagcatgcctaatataaaggtgcagctagatgaatttgcacaaactgaacacatccctttaaccagcacttagattaaaaacagaaccttgatgatacctcagaggcccccttctgccccttttcagtctctccgtgctacccccatggataagcattatcgtgatttctaataccatagattaattttgccagtttttgaattttatgcaaatggatctatttcacctaattgtaaatatataacattgtcatagcaaggcactcattgccttacactgaaaattacattgactctttgccacaagcttagacttgctttctcattttattatcatcaagcctatagctttcacactataccttgttcctgctcttccctactctatttcttggtagatattctatatcagtcttagagtgcagtttgcagaacccctccatcagaatctcctagggagcttgttaataatgcagattcctaggcccctcccatggtttatgaatctgagagtgaggcagacaagactataccctctcatgcctctataatgtaataatgtcttcctagaatgttctttgctgcatctcttattaaagaaatcttatgggccgggcagggtggctcacgcctgtaatcccagcactttgggagcctgaggcgggcggatcacatggtcaagagatcgagaccatcctggctaacacggtgaaaccccatctctactaaaaatataaaaaattagccgggcgtgctggcaggcgcctgtagtcccagctactcgggaggctgaggcaggaaaatggtgtgaacccgggaggtggagcttgcagtgagctgagatcacgacactccactccagcctgggtgacagagcgagactctgtctcaaaaaaaaaaaaaagaaagaaagaaaaaaagaagtcttatgtttcctttatggccagagcacaacattgtcatgaagtcatctaaaatttcccactagaggtaacatctccttcccctgtctagctcttttaaagcattacctccatttgccttgtatcatagctgcttgtacacctgtctgtctttccgctgaggttataatcctctggagggtcatgactttgcattcctttgtgtctcccattagcagccagcacagtgccttgcatactgttagttctaaataacttctctctctctctctctctctttttttttttttttttttttttttttttttttttgagacagagtctcgttctgtcacccaggctggagtgcagtgcaatggcatggtcacagctcactgcaacctccccatcgtgggctcaaatgattctcctgcctctgtcttccagtagctgggattataagtgtctgccaccacgcctggctaatttttgtatctttagtggagacggggtttcaccatgttgcccaggctggtctcgaactcctggtctcaagcagtctgccctactcggcctcccaaagtgctgagattacaggcgtcagctgctgcgcgcatccctaaataaacttttttttttttggcatgaaatctgtaacactggaaagatgttattgccttagaataattaagagattaaatgtagaatctcaaaaacattcatttttttccatgaaaactttaccaggcctcaagggataggaaaattatgggtacagaattgagaatctgtaggaacttgcaagataaacaacggtttcacaagaaagaccttgttggagagttaaattttcagacagttgtaataacttcacattaaagttttgtcaaaaaataagtatctgcatgttttgtttgccttccaatgccctcattttatttgattttttcccataagtaactatagtgaaagcacgaaaatgtgtttctgtgtttgtgtgcctgtatgttaattgtgactgtttctattgcattgttattgcagaacctaggcacgcactctgtaggcttgggtgctttctccaactgaaaaaaatcctacatatggataaattatttttacagccagtgtttaattttacaagtggtccccctccttctgtttttaggatggcagagagaatacatatttacttaccattatcacttactcatgctttgagcttgaaggaaatgagacagaaaaatgaagtaacattaacttctctctggaactatgtttctcatattagagctttatctgaggagttcacttcctctctcttcaatgctttgttcctctccagtcgattcaaatgtcctcttaaagcagaagttccgaacctctttctgtgacttcaggagagcatgagaatgtaaatataagttttaggactaaattttcaaagactttttccactcagctctcttttcctcttcggtttgttgttgtcgttgttgttgttgtcgttgttgttgttgctgctgctgctgctgtttttccccttccacttccgtaactgagctcttagggtccatctggaatctgattgcaattaaaaaaaaaaaagtttatttttacctccttgtacgtgctttctcctaaagcaggagtcagaagccttttttctttgaagggctagttagtaaatattttaggcttgtcgtctttgtcgcaattactcaactacgctgttgtagtatgaaagcagacaatacatacctgaatgagcatggttttgttcctagcaaactttacgcacagagaaatttggatatcgtataatttttatgtgttgcaaagttgtattattcttttgatttctccccaaccatttaatatgtaaatcccattcttagcttgtgtgccatacgcacacaggcagcaaatgcgagttgtcacacaggctatagtttctgactttatgtcttaaagtaaacagtaataatcattctctttttccaaacagtccactaatctccctttgtattcagcccttgcatagtaaacgccgtttcttcatcatcctgatttttattctgagaaaatactgtatattgttcccatgcactagggttcggggaaatttaaaaggatgtaggatctccttttcattggtcctaaaattgcactggggaggcaggtcatgtttatgaacagataaatagtatcataatataatcatgcatttctatggctagcatttagaactatagcttttgatgtcatgtggtttttatatggttgattatttttttcttatttataaaatgaaaaagtttgagaatttttcatctccttaatgtattcccttatttgagggaaaagtatttacctactacataggaatttatcttaaaattttctttgtctatctatttttatggaatataatcgagcaactattttactaattaatactttaatatcattatgaaaatgttctcatatttttaaccttataagatcagataattgctatgccaatctatggttgaaatgggttcttatacttaacgctatgctctttcttctgagatgtaaaaatatgtttaaatcagaatttatataggtgtcaattcaaaatgacagtagttcattattttgattagtataaatgttcacaactaattctattctcttatctattaagtcaccaaataaagtatatttgttttaaatatttaacagtttaaattattctttgaaaacttatgagtctaaagtaagaacaattaacccattcattttgcaagtgggatagttgaattttacttgcaatccagggatttttgacagtttgaaatatacatacataccatgtatgtttaggaaaacatttaaaaagagggggttgtaaaataataatagttcttccatgattttttagccataatgtttataatataaaatatgtatactcttgttattgaatgtagtatgtttctaatttaccagaaggcaagagaataatcctggagaatttctcaaggcatcttcgaactctttgatttattgctcacatatagtaatttgccaaatgacgccctagtgaactgaaagaattaatgccccgtcctaagtcactttcaccgagggactgaaaacctgcagcattttgccaattagaggaggaaacaatctaccttgcagagtcaggagtactggataaaggagctaagagtgttgctttttttccccttcttactttaaaaatcccaattcatcccatgtctttcttaaaggctaagtgaagtagtaagtacgtttttgcaacatacgaatttagcagactggccttgtgtttatttttggccggaaccattacacttatttccaaccctctcctttatttgttggttgataatgggctaattttgaatctttactgtcaaaagaacattaagagaagcagccctgcctgcatcgcaggctatgtctgtcctttgccgagtattaaacactaaaaaaaaattaagaaaatactaacaaaatgacaaagcattaagaaaataaaactagatgttaaaggaaatgagaaaataggaaaggatgctgtacctggagtgattttttttccccaggctacctaagatgatcaaaaaagagctaatttctcttaggtttctattaaggaattactagaatatcgggcacaccaggaaactttatcagtggacctgtcctgaaccaaattttcttaatgtatatatgataatttgttaccacatcccagattattttacaggaattaaaatatatttgaaacactgacagggaaaattgggtaagacattgatagatactacaatctgtacttgaaactgcactcaaggaattcgttagtcaagaaagaacacaatgactgtgggcccctctgggttttggaacctcttttgtaaagcatttttttttttcccaaatagaagatattatttttgaaaaggttaaataaaaaatctttgttcactatatagtttcctcctaaggagtaaattaatttatataaaatattgcaatataaataacaattttaaaatctcaaaagagcagtgttttaaaaataatgtagaaacattaagaaatgacttcaaatgataagaatgtcattggagagcaaagggtttttaatattacatatcgtggcacgtatatcagcacccaaccgctcaagatacagagttctttacaaaaatcaaacagaaggaaatgtgccaccttgttcataaactatatttaataataagccaggcagataaagtcactttcacaaataatgagcaagcccatggtaatataattcatttacaataagatttatctcatggaattcttagactgtgctttgaaatttaaataattctgataaatgccaacagaatagagaaatcaattccagagcaattactaacacgttgcattacctttctaacattaatatttctcttcatacatatcattgaagagaaaatgaggatggaaaataaaaagatcaggtaatatatttgctttctcatctagggttgttatgatcttcaagatgaagttttattttttactcctagcaaatgatattcttttttattttagtttttattattttatttttctgtaaattattggggtacaggtggtatttggttacatgagtaagttcttttttttgatatttctgagattttttttttattctactttaagttttagggtacatgtgcacaacgtgcaggtttgttacgtatgtatacatgtgccatgttggtgtgctgcacccattaactcgtcatttagcattaggtatatctcctaatgctatccctcccccctccccccaccccacaacaggccccggtgtgtgatgttccccttcctgtgtccatgtgttctcattgttcaattcccacctatgagcgagaacatgcggtgtttggttttttgtccttgcgatagtttgctgagaaaaccacgaggtaccatctcacgccagttagaatggcgatcattaaaaatcaggaaacaacaggtgctggtgaggatgtggagaaacaggaacacttttacactgttggtgggactgtaaactagttcaaccattgtggaagtcagtgtggcgattcctcaggcatctagaactagaattaccatttgacccagccatcccattactgggtatatacccaaaggattataaatcatgctgctgtaaagacacatgcacatgtatgtttattgcggcactattcacaatagcaaagacttggaaccaacccaaatgtccgacaatgatagactggattaagaaaatgtggcacatatacaccatggaatactgtgcagccataaaaaaggatgagttcacgtcctttgtagggacatggatgaagctggaaaccatcattctcagcaaactattgcaatgagtaagttctttagtggtaatttgtgagatcctggtgcacccatcacacgagtagtatacactgcaccatatatgttatcttttgtccctcggcaccccttttctaccccccaagtctccaaagcccattgtatcattcttatgcctttgcatcctcatagcttagctcccacgtatcagtgagaacatatgctgtttggttttccattcctgagttacttcacttacaatgatagtctccaatcgcatccaggtcattgcaaatgctgttaattcattcctttttatggctgagtagtattcatatatatatatatagacacacgtacatacatatgtatatataccgcagtttctttatctacttgtcgattgatgggcatttgggttgatacttgcacacacatgtttatagcagcataattcacaattgcaagtgatattctcaggaagcatgatgtaagtgacagagacttactttgtagactgcactcattcacttgttctctgaatgtgctctaggcagcctgagtttctactatgtcagtgttacatagatgagaaaccccatgggtggtttccacagaggctgcaatactatttttgataccaaaaatctgtttggttttgtgagccccagatgcccatatggaaaactgaagtgttgatacctctttgtagccctctgatgaactgcatggttcaccttcctcagcagtttgagcggggtggggagagcgcctgcttcctagccatccgattggcctgaatcatcaaaaatgctatcatgaaacaggttctgtttatctgctccagattacacccatcatgttctagagtgctggtttcatgcttgaatctagatcaagcctgctttcctcccctgcctgtactccctgtggctacctacagtcctgctgctgacagataatctaaaccaatagcacctaattagcctatttgctcatgtgttttttccatcgtggtataatgtcctccttgtcaatttagggtgaaaatgtagcaacacgttgctgatggtttaatttctggaatgcaggtaatgaatgtgtttttgcttatccaagtcttcccatcagatgtcaaatatagaagaacagtgttcagaggtcctaaatttaaattggagtgagaaattcacagcgcccctgaactcaggcaaaatgcactctgacaagtcaaccagatattcacagatggtctggaggatttgaagcctaatttggtgaaataaaattaaatgagtgaaattgtatgcagtcattaatctatcaccatacttaaaatgcttcattgaaatttcttttactgcttcaaatgaaaaaagatcaaactatgttatagaaaagcattcaaaacccttacataacatagataaaacttggttggagacttacagaactttctctgctgcttcgagaaagttacagtgcccacaaatctattgctattagaatattttattgtattcaacactcaattctaccataattatgtatatgagaaaaatatttttacctataaaataattattattaccttttaaaaatctgacattcttccttttttctaaagaaacatatttagatttagcttttattttatttttgtgttgatacatagagattgtacatatttctaagattctagtgatattttgatacaagcgtataatgtgtaatgatcaaatcagggtaattgggatatccaccatctgaaacacttatcatttcttcttttcaatgccatcataccaaaaggaagtaaatagaatttcaaatataaggacagccatgattttacatacatgcctacgattccaccacaaaccataattacgtcccccaaacttttaacatttcagatactttgtcccaggtatttcatgataaggattgggctatgactctgttacagaagggccaaatgactaaaatgtctctgaacaatattgattgcaaatattctacccagttgtcaggtcaatatgttccaattcggaatttataacattgtatctctactcccaaaccatccaatctcacctacctcacttccatattatggtgggtgatctcagattatatttaagctcatggttacttgtcaagtagatatggagtttagcctaacttttgaaatttatgctgagattacccttctcattatagaattaagtaggcagtttccaagtttagatttagcaggcagtttttttcaaatcacttaaaagttatatttttttagggcattgaacaggtttgaaatcctaccaagatgtcatgtacacatagaccaatagaacagaatagagaacacataaataaaactgcacagctacagccaactgttcgtcgacaaagtcaacaaaaaaataagcattgggaaatggattaaagatttaaatgtaagacttcaagctataagaatcctagaataaaatctgggaaataccattctggacattggcttgggaaagaatttttgactaagtccttaaaagcaattgcaaaaaaaaaaaaaaaaaaaaaatgacaagcaaggacttactaaaataaagagcttctgcatggcaaaataaatgatcaacagagtaaacagacaaacaccaaatgggagaaaacttttgcaagttatgcatctgacggtggtgtaatatccagaatctatgaggaacctaaacaattgaacaaacaaaaatcataaaacatcatttaaaaaatgggcaaaagacatgaacagacatttctcaaaagaagatatacacgcagccaataaacatgaaaaatgcgtcacatcactcatcatcagagaaatgcaaatcaaaaccgcaaggagataccatctcacacccgtcagactggctttgttaaaaagtcaaaagacacccaatgctggcaaggccgcagagacaaggggatgcttatacactgttgttgggaatgttaattagttcagccactgtagaaagcagtttggacatttctcaaagaacttaaaatagaactatcatttgacccatcaatcccattactgagtagatatccaaaagaaaacaaatggttctaccaaaaagacacatgcactcacatgtttgtcacagcactatgcacaatagcaaagtaatgggatcaacataggtgtccgtcaacgttggattggataaagtaaatgttgtacacatacaccataaaatactatacagccacgaaaagaagaaaatcatatcctttgcagcaacatagatgcagctagaggccattatcctaagcaaattaacataagaacagaaaaccaaatactatatgtactcagttatgagttggagctaaatgttaggtacttatagaattgaagatggcaacagtagaaactagggactaatagaaggggaaaggaaagggggagacaagggttgaaaagctgcctattgtgtactatgcttactacctggttaatgggatcatttgtatcccaaacctcagcatcacgccatatatccaggtaacaaacctgaacatgtaccctctggatcttaaaagttgaaaaaaaaagatgtcatataaatattcgtggtcactaaaagtatctaatgtattatacataaaaataaaaattgggtgaattggaagtgtattctttgtatcaagtcatgtcggagatcctattctgctttgatcacagtgtgaattcttttgcatttttgttaccagtcacttctttatttattgaactaataattacatattctgataatctgtcagaaagataaaaacattctttgtccatgtgtctgaaaatttttaacctatttttctaatgttttaagtgagaagagcatgttaatactgaaattgtaagcagtagactgaaaaatcatcccaatccatgggttatatattgaattgcttttaactgtattactaaatattaagcttaatttattttatttctacatatccccatttccactataggtgatttgtatgaatttaggaacttccttctctcatccatttttatattaaaactcagactttctaaaacaatatttctatccatccatcgttggtaactatgtactgacatgttttgtgcatccgaaaaatgttagcattagtttgtgcgcacagaagtaattccagtcaccatatgatgagctgatttatttatttcgtaagtgtgttcattattattatctcttcagcacccaaatatataggggacttaatgatacctacaagtaaaaacggaagacaaaaacgccctgctctctacagaggttaaaatgtttttgcaacagggctctagatctcagctgtgaaagtagggacgagatgaggctaggcatgcagtgtcagtataatacaatataatcaacatgtcagcatctaatgcaggtgttgcaaaacaaaatgtacacatgggtagtcaggtaacagaaaagcatgaagtagtaagggctatctatgcaagaggttccaagctgactatatactgaaatatttaaacactatgtggggcaaataaaatggacattagaacagttcgatggtcagttggggacttctgctctttcttccagtctctgaacatatcttaaagccacaatcatctatttttatttattgttatacatttatttataagccagcacccctgtgatttaagttctgttgaaatgctgagttggaaaagatcgatggatgggggaaatttagtgcagaggttttgccccaggttcaaaatcctttataaaatattaatacatggaacaaatattgaacaattaaaccactgataagttaatcaatctgattcaaagtacacctgtgaagagggacatggcaagaaaaatattacagtaagaactagaaacattccttcatggctgcttgatatggatatgtcatgtttaagaaaattcttctttagactgttgagattttttttcctgacaaagaagattcactgtcgaggaaagaaagaggtactgtgaaatttgttattgaaaacatgcacatacttttgtcagaatgagttaaagagtgaacaaaatgtgcctattacttacgtgttgtgctgttttaattcaagattaaaatatttaacgtccacagacaagaccacttttatatgaatattatttttctgctttattgctcaattttattaccatttcaaaacacccgtgttgctttctatggccaaagatgtttagcacttttcatggttatacttctgtacagtccaaaatacaacacttactttacacatacacaaacatccaatgtattttgttttctgtcaagtaaagacaatgtctgtgttattaagttaaatgtcactttcaaatacaggatatgttgatattagaatgttcaactttatttcctcatttaagcaaattacagtgtgaagaatgtaactgcagcaatttataaaaatcatatcacattcaattatgagagcaaacttgttttgtagacttgaactagtttcaattaatcttggagttatcatttcaaaaattctaaacagagagaaatacggagtgtaataatggtaggtctttgggtaagctgcttccaggaaaagaaagcaattatatatgttcacatagcactgacaaggagaaacaaaactttggacggcaaagaacttgcattagtctttttgacatgttcctgtggtgtgatttattacgtagacaatcagctcaacttctcaagtttgatatccttggaatcatttgaaatttaaattttaatgaaaattcattaattccaaggccaaaagaagtgattctaattgcttttgagaatcagactatgaaagaattctttggcaaacttgcactgtcttttctcttttatcattggttgcttcgtaggtacttaattgaaggtcctctgattatcagcacgggctgacatcagttcactccatgcattttaaacagtaggccagatgtttaaaggatcagctgaagcatcgatagcatgctagggtgaataataaaattttcattatctacaagaagcaaataaaaagcataagcattttcccccattatcctgaaggagaagatgaatgcctaagcaacattttaagaatgggttgagtgtggcctgtgggaaaatttgggtagaaaacttgtagttagctaatgtatatactgtttgcctctttagctcaccatatacccacacacatgggcatgcatgcatacagacagacacatacaatacacacaacaaacaggaaattcagatatactgaagaaatgtatttaagggattactaagtttttgtaaataaaatcctttaagatgctgagaaacaatggaagagaagtaggacatgatggctcatactttcgtaatttacttgtttaacgtttgccaaggtttaaattaatgtagatgtttttgtggctaggattaatgatctaacagtttggaataattaggcacttttatcacctagaaagcccagaaacccagcatgcaaaaattctggtatgtctgcattttacacttagatataacagagaaatgacaagtagtcaagtggatagagaaacgaatgattcttcacacatgcacacacacatagaaattgtctttttaatagtattttaatgtaacacatttatgcataatttctccatagtgtttatcttatagtgaatatgtgatgaatagtctctaacattagtggttttatagattaaacataattaaggctttatatattaaagagtcaattggtgacattctaatataaacatgtttatctcatatacattgaaatattagataattcattcgttgagaataaatcgaatgagtcaaaacttttaacctccactttgagctttgtaatagtatccactgaaaatattcatgaaaatttttaagtcatttctatttatatattcagtccaaacatctcacaagtttaaaatgtaaactcaagaatataatttctgtattctacaattggaagcatccatcatatcagatgaacttatatagtttgtgaaattttgcaaactttctgtttagtaaatcttaatgtcaaacattttaacttccaggttgtctttcttttcagttttaatatccgcgatctttgtatactcgttgaatggattctcaataagtaacccacaaatatatatacatactatgtacctacaaaaaataataaaaagtaaagaaatcgacacttatccatacctgtcccatagtaataaactattcataagtatatttgaaagatatgagaatcataaaagttcgtgtttgcacccttttgtgcgtggaatcctaggtttgcattttgtggatctagactttttggagtgtggaaataaatgaaacaaataatcgagacccagtcttatattcaggttatcattttactacataaagcataaataacatttgcagtttgtttctatggctagctctaaagtcttagcaacgagaacattatagaaagacttcaactgtagcttccagcagaacttctgaggttccgtttatggactaagcagcagttgagggggacaaaactcataggcaattgatcactccaaaggatagattgtcttttctaacctaatcaaaagatttatagtgaaggcatattcagattttgttgaaggatatggatatataatcatgtgtgtgtgtgtgtgtgtgtgtgtgttagacatacttaaaacattatttgagtagaaaattctgcacaaatggaaaagtataacatgtgttatatccacacatgttgagcatttacctggctgaaacatcaaaagctgaattgacttaattgaatgttgaatacttaatagttactttgtagtgactcactattaaaacattatctcaagctttgtcagaattaatttttttaaaaaactcagattagtgtcaggtttactgaaacagcagatctgaaattactgtgtttttttttcctttcaataatcagtttctaatccaaaattgaatatcagttccaactctacattcagtttctgttttacttgtttggactggcttttggttctgttttccacatagatcctctctgtgtaagacaaagccatttgtgcagattaaattttactgagcgtgttaacctatttaaaacattcatccaaaaagactagtatgaattcttcatatggcaagctgcttgttttaaaacttccatttattctaaaatcctttttacttatactttttaagaaacgtattcccgatatacaaaagtaacacatgctcattaaaacaaattaaaaatagtattgtataaagagctgatacatttctgccttgccccatttaactttcttaagtgttcatgtgaatcatccattcacatcaagacatttatctgtattcatatgaacgtgttttaatatatataacatatatagaattttatataaactttccttttaaaatagaaatgaaattatatgatatatttattctgtgtctagctcttgtcacgtaattattcaagaacatatttctaggttaatatctgtattcttaggtagcattcactaactcctcatctacttgttttcttccattctaattgtgtttaacatttcttcatacaattggttgtcatttggtcttctttcatggagggtgcataatgttcattctcaccaattctttacactttacataactgcttgatacgaagccagaccttataaatatcaacaaagcaggaacactgtaatcagctatcagtttcagttgagctgaatgaccctgaatatgtgtacacatattttccaggagattttaaaactgacacctcagatttctaagacctggagaaatcagcatgagaaacattgatctatattattccgtgaaatgatttcactaaatagtgaagcatctcccacatgtggactctgtaatttattagaataaagagttcatgtgcttctgaagaacttgaactactcttctggcctccgtacattggtttcttagctataggaaggctgagcatgtttttcctatgcgtttcctttctagctcatcattttagtgacaaaacaatctttcgtggtgttgctctagctatagaattgtttcagattcatttgaccaaaggtggcaaatacaacagtcccaacaaaaacaaaagacctattacagaatgatggaaatgaccccagggaacaatggcacctccacatttcttaattccaaggttataagcagtggtgtggacaattctcaattccaatgctgaatcgccttctaatttcaaatacctgtgctaaaaattatttacgtctactgaaataatgaactggaccccaccaggaatggccgatatgcttgtagtcagagcacaactgtagaaagaaaataacattttaatttatagaggtatgatgatagctgtttcatactgttttcagaacgatgaatggcctgctcagtagtttcttgtcatcgtactgagacactttaatttcttaccagctgagatgaggaatacgagcccagtgtgcaggtgaaattggttaacaggagccattaaaatttggaagagtcagaatagcatcaatcaaaatgctttcagtgtaggaagtaaacatgtactagcctgacccacctgtcttttcttttaggtatgttggtaatattacaatcattttgaggtatccataaacaactgcttagatctgaagaattgtatatctttctttactctgccctggcctggggttatggttctcattgagctctaacctttcagaaaaaaaatgtagagaagtggttcaagaagaatgctttatcttgcttcataaaaatgatagtgatagttttattgaaggcttactatgtgccaggccaaagtgcgttttattatcgttcccattttccaggcaaagaagctggagcacagagaggctaagtgagttgtccaggatggctcagctaacatgctgcagttgggatttgcacccagaccaacttcttttcaaccactgtcccatcctgtgtcttctctactcaaaaagtgtttcagctccaaacctgaaactttaaagaaaaggaaatccttagtggaaagactaggttttagtcacaaattatctccttccttacattatttgtctctttttcaaatactccaagctttgattaaaactgtctatcactaggaacattgtagaattgctaaggtggaattgttaaaagaactcaattccaattaactttgccattgattactgtgtgttctggaggggtgttctttctttcaggttaatgatgctttattgtatatctcaaagattaaaaataacaatgaaggaagtagcaaaccggaacttctctcacaatgcatctttcaatctcgtgctttaaatgaagataaaatcatggctgtggtaaggttgcaggaaggatgatatagattaagtttcttgcaaactgccctctgaattttcaatagctgtagaaggtattggttttccaaaaaattgacaaattgaggattcattcagcagtttttttctaggtctcttaccagaaagtgatcactaaaaagtgtagggaaaccactcaaagttggatagatcattattttcacttaagcattttaatttcttgaaggagctttataatgcaacaaagaatttacagtcctgtgtcaccgcttaaattttctagggtcatcagtaaactcagtggaaataaattagttcatgaatataattgacccttaaattctgtcactgtgcaagtaatcggtgggtctgctggatatggctttcgagcagacaggtcaacttcttcaaacagagaagaagcatagcataaattgaagacaaataacaaactacttgtttcctccttctttggcatcaccctatggatggagtatgcatttataatttaacacaatcaagagatctttattatcctacttttgggtacaactgcttcgtttctcttttgaatctctacagctatttaaaaatctgttttgtaaaattctttaaaaaactaaaacatcagattcatatttcaggtatcttactatcttataccaacttaagcatccagtattatcacccacccttcccctgagtgaatccttagcactgggctcttcctgttttatccctgtgcatgctgagctctttctggccttcaagtctacttccgttgcaactgttgtctgaatggtctctctatgtccttcttactctctaaatatttcggaatttaaagcctggaataatctaccttagtccaaaagatatgctacactattctagttcacaatgatctcacactgccgttgatacacaacatttaatatcaacttaatatctatttcagttcattacgaggtcacttatgctacatcttatattgttgccttggacttttattatctcttcatatatgtgtttatggtgctcccaccctcacgagaagttgcaaataccatgttagctgtctgatggctttctatgttgtcaggtataccatttcccaaccagttggcattcaatgattaagttcattaacaaagaattgtatgtgttgaaaaagatgtttttttcttaatgaagcacttgtttttatttttttaatgaaatccaccctcttaataaattttaagtgcacaatacagtattgttaaatataagcaaaatgttgcatagcagatctttataatttttttaaccctacatgcctgatagtctatacccattgcacagcatctcaccatttcttccctcctccagcccttagcaaccaccattgtactttctgtttctataattttgactactttagatacctcatgtaagtggatgcgtgcagtatttgtccttttacgacttgcttattttatttagcaaaatggctacaagattcatccacattgtagcatatggtaagatttcctttttgtggcagaatgatattccattgtatgtatataacatagctttatacattcccctgtcaatagacatttagtttgttcacacctcttggctactgtaaaaatgctacaataaacatgggaatgcagatatctcttcaagatcctaaattgaattcgtttagataaatatccagatgcgggattgctagatcttatggtagttatattttttatttttttgaggaaactccatattgttttccacaaaagctgcacaattttatatttccaccagcagtctacatctccaattttcctacaccttcaccaacacatgtaatgatcttgggctttttttttttttttttttaataatggttatcctaatccgtgaggtagtatatcattgtggatttgatttgcatttccctggtagttagtgatgttgaacatcttttcatataactgttggtcattttaatgtcttctttggagaaatatctattcaattcctttgttcactttaaaaattgggttgttcgaatttttgttgttgttgttattacgttcctcatgtattttagatattgacaccttatcagatatatggtttgcaaaccttttctctcattctataggttgcttttaattctgttgattgtttcccttgctttgtagaagctttttagtttgatatatttctgcttatctagttttgtttttgttggctgtccttttagcgtcatatccaaaaaaaattattgtgaagaccaatgtcaggaaatttttcccttatgttttcttctatgagtttcatagtttcagatcttatttttaagtctttactccatttcattttgagttgatttttatgtatagtttaagttaaaggtccaattccattctttgcaatgtgtatatccagttttcccagcaccattggttgaagaggatatcctttcccagttgtgtattcttggcacccctattgaaggtgatgctaggtttatttctgggatctctattctgttccattggtctatatgtctgcctttatgacactatcgtgcgctcttgactgaggtagctttggtaattcattttgaaactagcaagtgtgatgcctccagtttattcttcttcctcaagactgttttggctatttggagtcgtttgtggtttcatatgaattttaggaaatttaccttatttctgtaaaaaatgcgattgggattatgataggaattacactgtatctgtagatggtttggatatatagacttttaaatgacacatcagatgtatttccatttatttttgtcatcttcaatttctttcaacaatatttcatagctttcagcacacacatcttttaccttcttggttgggtatttactaagttatttattctttttattgctattgtaaatgagattgttttctaaatttcctgtttttatgttgctagcgtatagaaacgcaactgttgaatgatgactttgtatcctgcaactttgctgaatttgtttattggttctaaccatgtctctgtgtggcgtcactcttaagattttctacgtatcagatcatctaatttgcaaacagatataattttacatcttcctttccaaatttgatgtattttatttctctttcttatctaattgttctggctagtacttctggtacgattttgaaaagaagtggcaaaagtgtgcattcttgtcttgtttctgatcttaagggaaaagattttcagtcttttgccattaaatgtgatattcactgtgggtttttcatatacggtttttattatgttgcggtaatttcgttctattcctagtttgttgtgtgtttttatcatgaaagtgttgaaacttgttaagcgctttttctgcagctattgagatgaccatagatttttagcctttgttctgttaatgttgtgtatcacactgattagttttcataaattgaaccatttttgcattccaagaataaatcctatatggctctcgtgtataatcctttcaatatactgttgagttcagtttgctagtattttaatgagttattttgcttctatatttatcagcggtattgttctgtacttttctcctagtgtcttttattgactttgatatcaggatactgatgccccttgtagaatgagcttggaagtgttctcttctctttaatttttctgaagaatttgagaaggattggtgttaattcttctttaactgttcattagatttcaccagtgatgacatttggtcctgggcttttctttgttggaaggttttggactactgattcaatctccttactagtttcggcctactcagattttctatttcttcaagattcaatattggtagattgcatgtttcaaggaatttgttcatttttttctaggttaacatacagttgtttacagcagtgtcttataatcatttgcattctttttggataccagttgtaatgtctcctctttcatttctgattttacttatttgaattttcctttttttttttttttttttacttaatctacctaaagatttgtcaattttattgatttgtttttaaaaaaactcttagctttgttgatttttctattgttttctatttcaattttggcttttttctgatctaatcttaatatttccttccctctgctaactttgggcttagtttgtccttctttttctaagtctttgaggaagaaaatggcaaggacatgactttctttagcagttggaaggacaatgctgtaaatactcaaaaattaattatttttatagtgacaaaaacaaaataaaaaacacttcaaagcaaatgaaagtttatcatttaatttatcaaatcactaagcagactgcttgatcagagagaagatactcatatgatcacataaaactgaaagattaagaggtaaggacattcatgttatcattacatctaactttcttatttccaagatggagaaactgagggttggagaaaaagaaagatttctttgttagatacaaacagacaggactaaactcagtatagcagcctcctaaattccaaagtatcatgatactgtgattttatgcattcttcagaaaaatagtagagccactggattctggcaaagaagttatataaaatgtcaagttcttcctttgcctcagaaatgaagttttatgttccaaaattgattgggaagttctccttatacctcacatcacgtctactattttacattgtttacttttgaagaatttttttaattgacaaataataattgtacatattcatggagaacctagtgatgtttttatatatgtaatgtatagtgatcagatcagggtaattagcatatccattatctcaaacattggtcatttatttgtgttgggaacattcaacgttctccttctagccatttgaaacttctatattattgctaactatagtcaccattcagtcgtatagagcactagaacttatttctcctatctagctataatttatttttaaatatgctttttgaatctgttactataaattgaatgtcacatcgttttgaaaatattcttaatttatgctcaacaggcaagattacacacctgtgataatatctttaatttaaaacattactctgtttaatttaccagaatatggaaccctagtcattttagaggtggagcaaatttcagtgataatctagtgcaaatttctcatcttatgaatgaggagattgagtctgatataagggacgagattttcgtcaatgagcagcttgttaacattagctctgtgatagaacacaggcacttgtcctcccaggccggtgtttcttctactctatgatgggctgttttgttgtagtttttaaacagcagcattttcaccatgcatagttttcttccaaagttcgttcttaacgtttttgcacagaataactagattttggaagtagaaaaaggaaattctctttgcatccttgtatctctggttattttctttgtcctttgatctctctctcctcccctcccctcccctcccctccccttcccttccctcccctctccttcccttcccttcccttccctcccctctctcacacattagagaaagagttaaggtattaaagaatacataatactattaaatttccttcacatagagaaaggaatgaaaaaaagtgaaaaatggtcctcaccaaatgtccaaacttctgtaggtcatttccatagtatcagcaatgtcctgtatggtgcctcggggatatgtaagcaaatgagcaagtggttagctaattctagctttggcaaacacttgttatggcttacttgaggagaagtcacttctccaaagtgaaaataatgtgcacaggtcaattagaatttttttgtagaaaaggaaaatactttgtagggacatggatgaatctggaaaccatcgttctcagcaaactattgcaaggacaaaaaaccaaacaccgcatgttctcactcataggtgggaattgaacaatgagaacacatggacacaggaaggggaacatcacacaccggggcctgttgtggggtggggggagggtggagggatagcattaggagatatacttaatgctaaatgaccagttaatgggtgcaggacaccaacatggcacatgtatacatatgtaacaaacctgcacgttgtgcacatgtaccctaaaacttaaagtataataaaaaaaaaaaagaagaaaatacctccttatgctcctgacttattttctttttggttcctcagtcctcttctctctctctctctctctctctctctctctctctctctctctctctcacacacacacacacacataccccacatatacaatatgattaaggatatatgtgaataatgaaagcttcttgtgtatagatttagaagtctaatggacaaaatcaatattttcctatgtgcatttaattcccccctttgatttaggtatatagtctttttttaaaaaagagaaaaaaaattaggtgaccttaaggtatagatcctactttcaaaaggtttacagaactagggagaggaacatggacaagatttaaagaactattttaagcagaataaaatgtgatttatgaacaaagcatatattatttgtgcgtatgtgtgtgtgccaacaaagatgcaattaggagattgcacagggagatgtcattagaaccaaccttaacgggtgagaagtctttgaagacatttagaacatggaagatctctgacagagggaacaaaggcatagtgacaaaagtcaagggcatatttaggactggagagtggtatgtgtggcttgagagtgggcgagaaaaaacaacaatgcctctgtaataggaaagtagacagaggcatgacattaagagctttgccagctgtgctaaaagtagtgaacaagagctaacaaagtgaagaaatgtaccttttctgatgtgtatcattcccttattcatatacttcttgagggggaaattcattctgtgttgatctagtaaactactacaggaccaaatgataaaaagaagtataggaaagaatgtttcagcatactttacgagataacttccttgtagctattctccatagtattttgagcatcacaaagcaatgagctgaaactgtctaagccaaaattgacttgtcatctgttagggatgcttagatgagaattctacatttgagagcttcttagattcattgaccactatgtcccattctaagatccatgaatgcgtgacctaactattacaccttcttttagtctgattgtcaattttgtattttcaattgtgcaagtttctaaaactattttaggaagataaatctagcagtggtgtgggaatagacaagagagaaggggaaagactcttcaggaaactaaactcacaatttatgagtattctttattgcccaagtcttcccaaagtctttcatcaagaaagaggcattgcaactctccttttatagtttgtttttattctggagcagtgatgttttggtggagttgttcctcagtgcgtaattaaagggcctatgacaattacagttcatctcctgctgctcaaggtactgcagatatttggatctactactctcattcatttccaattaatgtcagctttagatttccttcagtatgctatgttataaaatttgattatcgttgtgcccaccttcccacttaatttcaagcaggtttctcgattacctgactaaactaatgaaatctgactaacccaatatctgtggacagtagtgtgatgttactgatttttgtatgattagtcaagtcatattcatgccacgttttcatatagtaccataaaggatattcttctcgtggtccttttcttttattctgaacatacaatgagaagaccggtaaagtgggctaggaaattaaagaaaaatacaaatggcaaaaaatatgggtcactcgaagtctagaatagagagcacaatcaattttgaattaaggggtgataaggtgatttggtcaggtgactggtgaaacaggaaagaaactatactttttgaagtgtttcatccatgtgttaagattcatttggggtcaagaatctaaatttcatatccctgggagtggaaactaagtaaaaaaaaaaattatggaccttggtttaatagctagaggagcaagagtgtatctttatgtgacttaacttctatgtgaaaagtgaaccttaagattaattattgggggaatttacttactcaggttctatgcctagatggtctgcccaactaagaaaacttattttcctgttactccatcctatttttcatacttttatactgcacttgcagaaaagcatatatttctacccaatacgaaaattcctgggaacatatttttctacatttcccaaattacttcaaaaagtaaacttaggttatttcatgatctccattacaatggacaggtggccttattgaatgttgtcctgtgaatacaaagatccagagtttaaagaacaaggtgtacttgcatctcccacttagggtttgcttgtggtggagagagaatctagtttgcttaaaaggatgacagtgcagtgccccaaaatatctgatatcattaaaagtctcatatttgtctttcgtaacttctctagggctgtcgatgacaggagacccttaactcctatgccttgattatgtgaataagcacatgaaaatattttagttatcttagttcacttttaaactaagtttcaattatcactagattctaaatatcatcattgagccgttcttaaggaactgattttctacatattcattcacttcacctatatctagtgtgtctactatttgccaagaaaaatttactctcttaattcagcattccatatacttaacatcataaaaagtaggccatttttagttttctaaattatttatttaaacatttctttaaaattacattctatcattacactatatttcaacactacagtaagcagcctattttgtgatttttccttatataaaatacataattgaaattaaaaatgaagttaccaagagccattttcactctggggaatgcacatttataaattatggggttattttttcttcatcagctttcatattattaaactttgtctcttcataattacagagatgactagacacagaagggaatttaacatttggtgtgcatttgtctaacctatactttatgttagaaaatacatttccatttgaaaaaaaatcagtaattgtgggtgtgatcaagagggcagcctgaaagtcgggtgatgtgactcacacctgtaatcccagcatttttggaggccaaggtgggattatcgattgagcccaggagttcaaaaccagcctgggcaacacagtgagagcctgtctctattagggggaaaaaaaaaaaaagaggaagttagcctgaggcaatgtaaatgaaatacatatttcaaggatatttatacatgattcacgttattcatataaagatgtgccagagaagactataggtacgttattttacactattttgctaggattttaagaaattcaatgtgtttttatttcagttaacttagaaaacttacctaacttatacttctcatggacacaaaagtttttaaagataggatcaaaaagcccacatggtgaagcattttgaactggatgaaaaacatctattatctttaaaattttatgatattactgattgtaatagactccctttttaagaaatcattccttatagaacataaggtttacatttacaatcaacaatttctatccttactacaataaaggcacatataaaaagtacagttgcatatttagcaggtttaattgtacattttaatgtagaaatcaattcaattctttcatttatcagcattattacagtgatttcaaattaagcataggtaactttgatatagataaatgatgtacacagcagttaaattttattttcaattatgtagtaattgtataacctaggcagtataatttgtaaactttgtattttattattatgcttctcccacttggcataagcacaacacttcctaaaagcataattttctatagacttaataactccctaaaaacctgttttggacccctatactatttgatataggcagaaaaaaaacataatccatgctcaaatttgaaaaatgactggtcacatttggtataatactaaaggtaaataaaatcaagagtctatgaacatttccggacctgcacatttgttttattaaaatgcataattgtctttagtgtgtttctatttgtttatactctactgattttaattaaaaataccaaaatacgtttattaaaaaactgtcagaatctaagttgttaaatatacttaactaggaaagtaactgtttaaacgagataatttatagagaaatgtggtgtattgccaattagatgtcaagatacaatacaactgataatgaaaaagtagcattttcttagggatggaatacagtgtaaggaacaccccagtaagaatacaaaaattactgaaaaaaaatcttccttcctgaaaaaccaagtgcccttcaagtgcagaacctcatccaactaattgttaggtatcactaaagcctgataccttcaattttctggatcattcaagctgtatttttgagtccttatactagaggaggtaaagagctataaaaacacttaatggtatctgatgtgaactgtggatcactttgacccatcacttctacgtctacatcttggataaattcccattgttgtcatagattgtacaggtttaatggtgcgtttgtggagggggctcgcttatagaaaatggagactctgaagggataaggaataaatgtatcacttcaggtcttttatttgaaattggggtccagagagcctttttgtatcagacttgtcaaaccatttccatttagtaattatatatgcactagcacttattcctacttacctcacctctttatgcccatttccttgtagttgcggttatgcatgaataatttattgcaccccttaccaacaatggaataaaacttccattctgaaagctttccatactcatttccaatagcaatagggtttttttaacggacgtattacaaatgtacgagtcagttgaacatagtattcctctttgtaagaactccaagtggatgcatgctgttgtctcaaatctcaattagaccttgctttgaggtcccttcattgccagtcatctgttctccttcccctgacttgagtatttctccagatatagataatacattttcccaactctgtgttccaagaactgacagtggctttcattcattttgtttgtttgtttgtttcttctcgttctcaagtatcccgcagtctactgtttcttccctccattcgtttgtcctttcagagtttcaaaatccagcataggtacttcttctaaaatgtcttacccttcacatacacacaccacttgagaccccatcagcctctgtccacacagtttggttacattcatagactatttttatacatcaaaatatttgaaaattttagggtaaatctcagtagtcattcatttttgctcttattcaaccaatactagtcaatcagcctgtgccaggttttgttgcaggtaccaggtatccatccataaagaaaacaacgtccctttgttgtggaatttacattttagcaggggaggcaaagaacccaataaatatgataaaatatcagattaaaagtacgatgaaaaaaatcatcagggtaaaggaaaaagggaagcagtattttagcaagagtggtgaagagaggaggctgagagtgtgacatctgagcagagacctaaatcaagtcaaggaatgaaacatgctactatctaaagaaatgagtcaggataaggaactagtaagagccgaggcccagagatgtgaatatgctgttccaggaacagcaaagagactggttgatatgatgtgaaaaatgagaagaaaccttatgatatgtgtcaagagaaaaaaaaaatttaaaagcatgcttgggaacggaggcctccagatgaaaaaaaaaaacacagttcaaatccttgttcatgcatttagtttgctttgcaatcttgggcaaaatgttaaatttctgtacgttttatcttcctcatttttaaaataggcacaaggacatctacttaataggttcattgtgaggagtaaatgagatgatatatctaggatgcctggcattatatcatacacttaataatacactgaataaataatagttatgtctatttatttccttatcgtttttattattatttcaatgcacagacctgttcataagataatgataaatattagtggcagaaactgaagatgttataaattattaggaggcgggaccactcagttcaatgtatctgttttaatatagtcagcaaaagtgtgaagataccaacaattaaatttcaatgcattcttccatttcactagttttataaactgatgaactaccagaatgtcaatgtatgaattgcatactcattcttaacaaacagatttgcaaaattatgtgtaaaattagccctcagccttccaatttgttattgtcatatttcatggaaatacataatctgtaaatttttgttttaatgatatgtgaaactgcctaaagtagagtcttggcaactacttcacatttgtcctccagagatagtggataaaagtgtcaataaatgaacactctatattcactaatcacaggcaagggacaaggaacagagtggtcacaaaataccacaaaattaaagcacattccaaattaaatatatatgtttttattacagataatgtttgctagactctttctaattatctgcaaagattttaggaatgttttaatgttttaatatttacacacctgtgtatttcaagttcagtcaaacactattgttaaaactaaatcttctcatctctaataataagatgtgaacttatcttggaaggtggttattaggatgggagagataatgtatttcattcaaagtaaaaatatttctctgtttctatctttctctttctctgtcatctatttatcatctatatccaggtatctatgcacctatgtagactagcattcaatgaaccatagatattattagtagtagaattgttactaatattaaaataagaagtatttaagaagaaacatgtcctaaagcataaggtcaattattactctcatgttttttggcatatgaagcctaaaaagtgtcaatttcaagagagtattaataaagattgtgataactgaaaggttcctgcttgaaattttgtgtggtcttacaaatatataaactctaagcatttcagtgagccaattactgactaggcactatgtcttatgactcttttgtcatagtatgtaaaaaacaaagagtagagacatcataaaaattatagtagatgggcactagggaattacgcaaaataatttgtagatttaatgtgaaaccaaaacatctgttcaagtcaatttcccacaggtcatgtggcaaagagtatgagttccagactgaggagaggaaaaggttgttcttccacagggaaataaactgagtgtaataaacataatttttcttcttaagcattatttaaaacaaaaaaaatgccattaaatctatctttcctgcctctcttatcaatgctcccttccctttcaccacttgtttcaaactccaagccttgggattttattttggctttttgccttaatgtaactaaaatgagagcatcacaaatatgaagctcatcaaataatttagcagcattttcccctgtttttaactttctctttggaaacgtagatttcgaaatttaagggcccaaaatatgaaatgcaattataataggccatttgttcattcagcttgataaacttgaataaatagtattgaacttttaatgcaaaaagaacaaaacaaaatagaactctccacgaagaaacttttcaatgtttgcatttctgtgtgaggagaagggtaatgaatgtgggaaccttaatggaatccatgttcttccagtgatgacaagggtcaaaatggagaaaaatggtcactttctacccagtacattatattagttctatgtggacaactataacatagctgatgctggttttcaggccataaatgtaggtatgtattttcctactatttataaggcaaaatttctatttgtttaatgatttctatataggtagattattctgtctttaggattaaaaacgacctgtagaccaagagactttctaatgtccaccttagagtatatggcttttactgttacagtttccatttcctttgcttgcccctttgagagaaggaaaggagacatttgggatacatacatcaatgaggagctattaatgaataaatgaatgaaattgtcagtcaatttatccacatgatcatcaattgccaataattttatcacctctgtgggattaagtagaggtaacagtttagaaatttgattttttgaaagcatttaaaatgttcaaatatatcactctggtaactaagggaaagtgtattattttcttatgcttagtcttattttggttttgcctttttaatttaaattgaacacttatatcaaagagcttgcaggattataatttgaatttttgaagcaaagatcattttcttaacatcaaacaaagagtagatacaataggaataaaatcggcagaaaaacaagagtatcaaggacagacggggagggtgggtctgtgttagcatgtattgctatgaagaaatagccgagactgggtaatgtatttttaaaaagagctttaatcgattcatgattctgcaggttgtacaggaagcaggacaccagcatctactcagcttctggggaggcctccgggagcttttactcatagtggaagatgaaacaggagtaagcatgtcacatggccagagcagaagccagggggaggttgccacacatttaaaaaaaaaaaaaacaaaacagatcgctcaagaactcagctgctatcatgaggacagcatcaagctgtgagggatccacctccgtgactcaaacatctcacaccaggccccaagtccaacacttggcattatatttcaacaagaaaaaaagtttaattggctgatggttctgcaggctgtacaggaagtgtggcacaggcatttgcttggctcctggggaggcctcagggagtttttgctcatggcagaaggtgatgcccacacactttaaaaaaaaaccagatctcatgaaaactcactcactacactgaggacaatacaaaaccatgagggatctgtccccatgacccaaaaacctcccgccaggccccaccaccaacattgggaattatatttccacttgagatttgagtggcggcaaatatccaaactatatcagggctcatgtccagttatatgtcaacatgcctgcattcgaaacatcctgtccaaatcactgccttgtcataatacttatatttttctttattgaatacgaacacaagaagattaaataatagcatttctactttaaaacagtgggcaccatattaacattggaataatagtagtaataacgatagtaataacaatgatataggctgggtgcggaggctcacgcctgtaatcccagcactttgggaggccaaggcgggcggatcatgatgtcaggagatcgagaccatcctggctaacacagtgaaaccccgtctctactaaaaatacaaaaaaattagctgggcatggtggcaggcacctgtagtctcagctacttgggaggctgaggcaggagaatggcgtgaacctgggatgcagagcttgcagtgagccgagatcgtgccactgcactccaacctgggcgacagagcgagacttcatctcaaaaaaaaaattaaataaataaataaataaataataacgataaaaggatatgtgtaggttttttttttaataggctgttaacattaataggcattgtgatttcagggatatcatcaaacatcctggtcctaagacatcccctattgaataggaagggcttaagttaaacttctcatgagccacaattttctgattatatgtttggtgtgtgtaatagccacctcagtgatgatttgattagcctggacccttacataatcattgaagtatacccatgttcctttatatacttctttagtgttgaaagctcaaaattaagcaaaatagtccccttgataatgtttagattcttaacatttgctttctaaagctggcaaatactctcttcccagtgtcatgaagttaaataacatgttgcttagtgaggactttaatgttgccatgccataggaagaccttattcgaaatccccttacctgggagaatgtcagattattaccccccaacttgtttaacacttttaggattttaaaggtgttcacatttgtattagaacaaaatactattgagaaacatttctagaaaaaaattatctttccaaattaaaatcagtggtatgtaatgtaggagtctgattataatgattaaaatacatgggctttgggcatactgcctaggtgaaactcctggtttattgcatcactattagtataacctatgggagttaacctacgtaagcctcagttaatttttctctcaaattgatctaataatcgtctctcataggcttgttttgatagatatttcagtgtatataatatacttaggacagtgcctgatatcagtaagtctccttatatgctatttttctttctattttaattatttatgcaagagaaactattatgctttaactcaattaaaataaaatgcctttgtatttattcatgtcaaaggaaatatgcaagtattgcattcacttcctaggtgcctttttgaattgagctttgcatggttagtttgtataaaaggttcagtgaactttctcataatgattttttattgaacatatggaatccattaagtgttagcaaaagtcactatccactgagctgtgtccaggggctgacagttatgtctatctcttgcaaaaataaacacatacataaatgcactaagacgtatattacctgtcgtcatctcttagagcatttccatttttcttttaagttttttctttcaatgggttttttatctttgtgagtacatggtaggtgtatatgtcaacggggtacatgaggaaggtgtatatattgatggggtacaagagaggttttaacacaagcattcaatatgaaatagtcacatcatggagaatgggttatctatcccttcaagcatttgtgctttgtattacaaacattctaattatactctgttagttattttaaaatgtaccattaagttattactgactatagcaaccctattgtgctatgaaacagtagatcttattcttatttttctaacatcttagaacatttccacaaacactacctgcttgttaaatatacctattctaatcttcatataatcaattacttttttcctctagaatgtactatgacacatccatggggaaaatgtagtaatctaattaagactatttcctctcattttatatttaaaagaatgtgctctatcaatttatttacttgtacagccgtaggcaacctctaaaatatttaaagttcttaaaagtcagatatttcagttaatattgtgattatatagttgattttgatgaacatgttcatctaccagaaataaattatacacacacattgatatggttaggctttctgtccccactcaaatctcattttgaattataatccccgtgtgtcaagggagagaccaggtggaggcaattggatcttgagggtggttttgcccatgctgttctcctgatagtgaatcatgagatcagatggttttataaagggctcttcccccttccctcctcactcattctccttcttgccaccttgtaaaggaggtgccttgctttctactatgccctttctactatgcccttcaccttctactatgattgtaagtttcctgaggtctccccagccatgctgaactatgagtcaattaaatccctttcctttataaattacccagtctcaggcagttctttattgcacatatatgtgtgtgtatgtgtatgtgtgtgtgtgtgtatatgtatgtatatatgtatacatatgtgtgtatatgtatgtatatatgtatgtatatatgtatacatatgtgtgtatatgtatgtatatatgtatacatatgtgtgtgtgtatatatgtgtacatatatatatatatatatatatatatatatatatatatatgaacagagagagagagagagagggaggaagggagagagggagggaagcatggagaaagagagagtaatagcctaaatagaaataaaactagctccaagtacaggttcgtcaacactctcctatcatacccccaccaaagttaatgttaaccacttggagccctgttcttccttagttgtggagtactttagcaaaattttaaatctaattatgcctaattcaacgacagtgctaatttgaaagtgttagaaactgaagacctataataataatgagagttacaaaacataaatagtgagacaatgatgaatgtagtggatgcatgtacgagggctatcatttgacagtagagatgatgctcaaggacagacaatgagtctttcaatgtgtggagaatgtgctgctgttacagtgatgtacaggaaagaaacaaaaactgaggaagtatcagtaaacaaaacactcaaacatatgagtatacagctagaataaaagcaacagtactagatgacaataagcccaatgttaactcagaaagcagaaggtttttaagaatttggggaatactgtggctgatgatacttatgtctcaagccacagatgccatatgggctctgcgcccagttgaatcggcaccacctggcagtaagtgggcaggtccacgactgccaggacatcccttccaacacttgtggagatcaccaggaaggggggagagacctgccttgacagattttcaatgtgggcgaaacaggtctattttgagaaaagatgttcaatagaacatatgtcagcaaggaagaagagatgatgcttagttctaaagctccaaagagctggcttacactccaacttggggaaaatgcatccgggaaatgcaagattaatctcatcttagccattcttttgaatggatggacatgacccctttctacttgaagacagaaaacataaccatattgatttcaggttttcttcattggtttccatttaggattgttcctccccatcttctttctgtgtaggcatcccagttcccaagtgttcatgaagcacgtatggccttcaggggatgtgtctgtatacattgttatcttatggatgcacggttttgtctgcaccttggttctgaatgtctttactcttgagcatctgcccatgggtccccttctcaaggcctcaatttcttgagtttaacactgcatggcccatgcagcttttcagttaagcatctcttgctatgaccaactcttttcctcagtcaactcccacactcttttcagggacaggaaaaatgtagccacttgctggctgcactctgaggcctcaagaaatttagtgaatctgcctttgcccttcttgctgatgaaatactgccacatcaggccccctcttcggaaacctacaagcatctaattttcttgcttcctccccaactttctttttgactcccccccatccagagagttcttatgtctactgtactaggaaaaactcattcttaaggtatggttttcaaatcattctctggtctggactttagctacggttttaaatgaagaaacaacccagagccaaaatataatgaaactatttccttcttccacagagtggaaactgctttggggttaaagggccagtgaaccaaatagaaaaggatctcagggaacacagattgaagagagagaagaaaaaatatgaaggcattgttggttctcttttgagtttaaaatctagtggggattgtaagcacacacacatatacacacacacgcttacacacacacaccagtgaagttatgaaggattttgtcactccaacgaccttgaatttgattatctaggtcagttgttaccaaagtggaatgtacatgcccaataatatgcgtgctaaacagttggggtagtgagaaaaaatactttttatttatcttgttctctagaaattaatattttgattgtatattttatagtgtatgtgatgtgtaagttgtgtctacaaaactagtgtcaatgtaatttaaaattacatatgtctgtgaatatatatttatatagggtacatgcttaaaatgtgtttacttctgaggtacatgaacatttttcccccaggcacagaaagacaaataccacatgatgtcacttaaatgtgcaatgtaagaaaagttgaattcatagagatgtagagtagaatcatggttaacagaggcttgggaggtggagtgagggaatagagagttactgttcaaagattacaaagtttcaactagacagagggaatacattttgagatctatttcaggaacattttgagaccctcactctaagtaataggaaatcattactttagttaacatatttgaatatgagttgtgatgttctatatcgtttatttggattctactaacccacacctagatttttatggcattacctttttactcactgtgaatatcctactcatagacagatgccctgggaacttggacttgaggcacccaagaactgagacagtgagatttgggggcacaaggatctatggataagttcatcttagtgatgataaaatcaatttggcatgtttcacggacagtgtgcattttagaaagggtaaagacttggaaacgggatatttttgagcccaagtgtttccaataaatagctgtataatttgaagcaaataattgattttttgttctctttgtgccctcgcctgtaaaatgggagaaatgtattcctttctcatccttctcatgaggccattgagagtatctaatgagatcagactgtgacatagcataataattctcatttcttgaaggcctattatacactttgcaagcactgtatgtgttgtttctacttctcttgttcgtttttcctggaataaatatccccccctcctttacattggattgccattattcaccctgtaaggaaggcttcatggttctcattttcatctgagaaaacttaggctcagagaagatcagtaacttatctaaaacacacacatacacacacagacatatctatgcccattattcttaacctagtttctctattcaggagttatctctgctgtctctgcttctgattataatctgtgtaagctgatccaagtgacacgattacagggaaattgtaagccctttgagagcagagactacctattgatatctacattttaaaatttgattttagccaacctgtttatatgcaatgactaacaggttagtttgacttgcaataaatattccaaatcctagactaagtaaatttattaatgtaatgatttaacttgattttttcattggcatgtttccctgaagtcgtcatgcaaaattgaaaaaaaaaaaagtatagtgtgtgattctagattgaaattcaggaatcctccagggttaccttgtttgctttccaaatagttcagattgcttagtctgaccaacaaggtccctgacacttggaactctgtctatccctctaattgactttgtccctgatgacctcgcccagagatactcttcaccccagctatactgtgttgctagagtttctctgatatcccatgctattgtttcctttgttctcttcataaggtaccatttcccacccgccaactcctgttttcctgatggacttttgtttcaccttacaagatcattgctaatgtatttattttgagaataaaaagtgtaggaaaggtcacgggacaaagctgtacaccagacctttcccagacgaacctagtgtataatctccctagtccaacatcatggcttaaggcagtcgatagatccgtcttaatgtcccttttgagttttctactattattatatgaggatttatttttgtctgaattcctccctagatttgccctagagagcaatgactatttacagtttattcctctttgtatctcttatgttaaggccagaccttggcacatattctagctgattagaagacgtttgttgaatgaccaagtgattgaacaaatgaccatgtgctctgccacagtccggtcagttctactttggtttggttatgtgtttgccacattaaagttgtagcctgggaagttcagttgtgagatgtctgcagaacatgaaaaattggaataatgaggttatttctaaaattgctataatttaaaataaatagtggtttattccatatatgaatatacactggaaacaaagaatttctagaatactggagattcaatgataacatcattgaaattaaataaataataggattatgctagttactttctaatttactagaaattgaccgtgtgcatggcacgtataatgagtatcatgggatagttacaaaaagtggtgcttagtgagtttctgtggaaaatctcggtaccaataaaacggaggatttccagaaatcgatattcctcaaagcttgacagtatttatgcacggttacactttgtgtgtctttcgtttgaatcaatggaaggaggctataactgaaaattattgttttagtgtattatatctttaataataagagttttaagaatctatcattagaaataattattcctcaatttgtaattctcaacatttgaacaaataaatgctctgtgtctatcagttaatcttgcccatgaagatttaataaagcacgctagtttttacaaatgtgattttagagatggtcattacttggtaaaatattttgtgttaacacttccatgaatatgttctgtgggaatatactgcctccacattgcttgctcatgaagacatgatttttcacatcatcctatcagtattttgagaaagagattgatcccatattctatgagcatttgaacattctctagtatttttgtttaatcattaaaacaacccttgaagtctatgtgctacactggttatttccctcttgactttcctttacagataaccctctatcataaacaacctatctatatttgttgtctccacatcatgttgccagccctgctttaacacactgcacattgacttctagcagcaaaggctcatgggaggtactctcatcaaggacactgatggtcctcatgttgctaaatttggtgggtcctctacagtctttatcctagttcaccttattatggaccactgtcaactctgttctgcttaaaacactctgttccttgcttatatgactctacactcttaactcctttgtgaattcctcatctgcccttccattaagtattgacgacatccttcatagttttgatctaggacctcttttcctcttacttgacattatgtgggtaatcttgtctttgaacgcaattaccattcttatgttgatgacccttaagctataattccagcccaaatcatttttctgaggaagctacaagaatacacaaatgtctaatagatctctatttagatgtccctcaggtgcttcaagcttaaaatactcacctgagctcatcacctcatctataaattctgcttctcctccctggctccctgatttatttaatatgaccaccatccacttagttgaataaagcagaagcctggacaccatctatacctccaattaatcactaagttttgttgttaaatacgttcttacattttctctctagaatgtcttattttccccatctttacacccaaaaccaaaagtcagatgaccctgatctcctgcttagatttcaaaacactatctcttgcctagactctggaatttcagtcttgctcctctccaatctatttctacaccctagactctggaatttcagtcttgctcctctccaatctatttctacacaaaagctagagtaattttttaaaaaacaaaaatctgaatgtgttcattttctgcctaaaagccttcagtaattcttatttgttcttccagggatagagtaacaactttcagacctagtttattagctagttctttaaccacaaaggactctctcacttgtctactccccctaacacacttcgccctaacctttgccattcctccctttcccttttccttcccagatggacttaagtcctttcagattcttaaatgtttcttcctccagtctcttacatctcttttccttgtaactctaaaaactacttagcttacgcaaggaaaaaggtctgtacaattcccggaatcagcgatcctaacgttccctgttgtttttttcgttgggacatgaattcattcacagtggctctaaacatcaccacccctgcctatctctcccattcctactttatctgagcttatccatactcttgaagacttacatattttttttctaccaggaaatcattactagccttattatcccactgtccaaaccaataagtctgattaggtatctgtatatatttaatattactatatgtgtttttctaacactctagtagaggagaaggtgtatttctttctgttttttagaagcctgtatttctgctattatagctcttaaggaactctcatgcaattgcctactagaatgtaagttacggtaggataagaactggatcagtcatatcacacatccacatataggacctagcaccatatctaacacacagcaggtactcaatacatttctttcccaaataactaaagagtttaaacaaaccaaaatgattaaatgagaagtaactgttttggtaattcttgtgtccttactagagtctaaattgagtgatttttatatcatcagtttatactcccctttcccaaccccaattctttcttttttaaattttttaaatcaaatatgccttaaaacttcaggatcagttgagtaaaatgatgcttttgtcgtcttttgcaaaataattgtatttcagaattttgatttagatattataaacacacctaaaataatagctttagtcttaagatgaagtgcttcttaaactccctaagatgggttggactatggatatgaacatggacaatatcacattaatttgtgtacacagttctaacacagggtctggcatataagaacaagtcagtaaatagttgttgaatggaattgaaaatttaagtagcaaataaagtattttgacctacaaagcaagaaatcacatttttctttttgtcacagttccttaggaagataattaattttttagtatttaaggatgttaaatatttattttatgttctatttactaggcttctttttatgaaaattaattggtgaaaatagcgtacatatcttcctttaccagaacatttacattttgggcagtaacgctggcttttgttaaaaaagcaaaatatgtgtgaaatttatgtttgagttgatttcaatgcattacatttccattttaaatcttctttgaaatactctatttttgacaccatgaaactgtattagatcttagtatgttagcaatgttttgcagttttagagccataattattttaatgaccactttcagcatatacgttttctacaggaaaaataatctcaagaacatgaaaagtgaaatctatattttgggtttcaaaatgatacattttagctaaaatatcatagttttaatttctcagtgaaaaatatagtgtggtaatttatgaagagactcagtgtttaaaaattatgactctatagtcaagtttatgtttataggacataggttattcaattacatttaaaataattaatttagaaaatgtgatcaatgtaacaaattttacctgttcttttctaaagctaaatttgttgtttgaagtgtttcttctaaaatgctaatgaactatcaatttaattgttgagcttagagttagaaacttaattatattgccagaaataaagaaacaaatggatcccaaaagattcacacattagaaatgtatgccagggaaatgcttttgaatgtgttcaagtcatggcttctaactcgtaacttataacttgtgttatgtctggcttcattcccttaagaaaaaggaataataatgccttcggagagcatcccagctgtaagagctatgcattggtgtctaaaaaagcttctcactcctcataccatcctggtctgggaatttaaaaaattgtcatcttttgataatctgtatcacatagtcttctgcatagtcatatgaggttagaactgccccataacttttgcagggcctatagtaagtgtgcaaatggttgcctgcatgccacatatttaatatttataaggtataaagtcaacagactattaaatatatcctatctgctttccttgacaattatacaatcataatgatatggacatctagattcgatttagaattctctctctctcattttctttttcttctttctttctttctctttctttctttccttcctttctttctttctttcttctttctttctttctttctttctttctttctttctttctttctttctttctgtctgtctgtctgtcttgtttttttaaatagtgcaagcagtttattccctggcaaggaatttggaaaaaactcaaatagcaaaccacttgatacaataaaataaattccttagagttttgtactggaatgaggcagcttggttagagctaaccctaagcctgttatttaggatacattggcttttcttaagcttaaaaaaaattttactgtgttaatgacatttaacatgagatctatcatcttaataaatactacatgcacaatacattattattgactctaggtagaatgttggacagcagatctctagagctaattcatcctacttaactgaaatgtaatgtctgttgattagtaacttcctatttcgccctatccccagcccctggcaaccaccagtccagtctttgattttatgagtttgactgttttagataccttatttcaagtaagtggaatcatgcagtatttgtctgtgtctgtcttgtttcacttagcgtaatcttaaggtccatccatattgtttcatattgcagaatttccttttataaaggctgaatagtattccattgtgtatatataccacatttatctattcatctgccaatgggcatttaggttgtttctgcatcttagctattgtgaatctgttgccttttttccctacctcctttactccatcctgcactgtgaggaactctgtgcacatagatctggtcgccccatttcccacccacatgttcaagtttttcccactcacctcatgcaaagatttaccccttagccatacccagtaactgactttgaaacatttgcccagggagttgagggattctgaatgccagatcatgggagcggggcttctagtgagcatgttggcttggtcctacagactcctaatcagagctttgcctttgaaagcatggggcccaagggcaaggaccctacttgttaaggtctaaattttttttctgaaataaccacatcgagcttttatgtgtagatggcctaaattgggctaacccagaggcagtgacactcaagtagtttacatctaagcgctttccatgtgcttcttttcccatttctgttacttcttacaaaataaaaaatcagcatctcaattaccctgatttgatcattgagcaatctaaaaagtatcaaaatatcacatgtagcccccatatacatacaactgttatatatcactataaataaatatatacacattatatttaaaaatcaatactttaattttacatgtttaacaaatcactagcatatacattccagattgaacttacgagggatgtggaaaagattcagtgactaaataacaataaagtactctaaaaatgaaaatgtgaaatggagacagtataaatctaaaatcatatcacttatgaagtattgtttcaaataaacaataaaatatatcttcaatcaatttaattttattttagttgtataaaatctttcggtcagcattaacctaattggaacactaaataggtacatctaaaaaatataatcccccccaaaaatatgtagctcataagagataatgcattgaacacagataatattggcgttaaaaacagaactctaccacatttgcaacgaaatgtttatctgttcttcctactagaaaataataaaatagttctgcatgagcttgaactcgaagtattaggtgtacaaagaccttttagtgaatgaatgctagctgaaaagcaaattttaaatatgaaaaattagcaagacaaacatttgaatttgtgggagatgagtaaaactcctataaaaatgaattgtttagtgttaaacagattgtgtatgaaatattaatggcatattgtcctgagctccccttccgctgtttccatgtagatgactgaatttcaaacagaaatatgccaggaatgattacgtgaatgaatattactacatgagattgcttaaagagtatttcttcttttgccttctttttactttcgttatttcatttagtagttagaaaatactgtctacaaatatgtgagaactgcttaatttatttttgagacattaattaattcaactaaactatattgactgtgtgagagagattcccttggtgaatatgtggatttttgcggtggtaagaactctcctctggagcgcaaatggtattgctctaggaataaagcatatacctcaggcccagatgaaccagtgcaatctacagtaacaggttcaaagatgacctcatgacctactgtggactaataaaaatcaaggagacctactgcaaaggtttctgggaaattctttttctcttgcgttgaactaagtaatatacatatgtgatagttagagctgcagcctttgtaataccatgacagaagataacctgaaataaggctgacagacacaagagggagacctaagagtactgagagatatggagcaggaccccctgattgaacttcacttgcagcccccttctgcagttttcaatgacgtgaaccagtagaatccctttgtttactgtttttgattaatttgagtgcagctttatgttatgagcaactaatagcatcctcactgtcacaactgccctctatacggcaggcactttgtgatactaaagaaagcagtatacagagtagagcccagtgaataacagggcagatgttgcaattaaactgcctgtttaaattctagctcttccactagctaacttgtgactatctaagtaatttaaccttcctataatcatacctatcttgaagacttgttgtaagatttaaagcacaacagtgctactataaaacaggtatacagtaaagcttagctacttttttattaggccatatgatatcatttcattaaaatcttatagccatgctataaggtattatgatcctcaatttataaataagacagctcaagttttggtcaagtgactttaccaaggtcatagagctagaaaataatgattccaagttacaagccaaacctcttcaatgccaaatttacatcatcccccattacttgaagtgtaagattcacatggacagaaatttttgactgtttgatcactgctatctccttatcatctaaaacagtctctggtccatattaggtgttcaataaatatttgtagagtacataatttccttcacagactccacaatctggtgaaggaggcagacatgtaagagaattatttcaggattccacagttgatgctgtaacagagctaaatataatgaatggaggaggaatgaataagtttgtctgggagcaatgctatggctattgaaataagtcttgctcatgctttgattgaaatggtggatatagatcacacaacaaataacaattagataacagcttgttgggagaaagcgaggatcagtgtttgccataaacatttctcatagctaatgtcaggtgtttgatttctcaacattttatatctttgactttgattttctctgtttttattttttaactccattctcaagaagtctgcacataagagtttcaacatctagcacttcataactccgtcatctcctctcaggcttagagcaaattctgagacgtggatttatcgtcgagtgatttcttcctggcattttatctctgagaccaggatctggttgctaagcatgtagacatagaaatgcatttcttcattgaaccccataggttcaaactagtggataatgagcacaatgtcaatgtgattatttgtaatgggggaaaggttaccggagaatattacacgaccatccacatagactaacattttcctcatgactaagtttacttagcaaaacaaattaaaaacagaagtttgtttagcagcacagaattgaaggaagacaaccagatggttatgaggaagattcatccaaactatgccagaactgaaagaaattaagttcattcagtacaagaattgtctagaataagagaatccattttgtgtcagcacttcccaagttcttgttaatgctaccttaagttcaattcaaaccaggcagcatttattacgtgttgtgctgggtcctaggaggaccgcgttttaagaacttactgtgatcttctagatcaagtttttatttcaatatttctacctcatttctgattcttaggtgttccttatttcccaatttatcccctgcagaaattgaggcaataagatgtctatcttattgcctatggtgttgattatttatgttatattctgttttgtgaagtttgacctctacctaattaaattacattttcaattgtatcttggattgatttattcaataagtattctttaatatttttgcatgaggtcggtcaggtttcatcagacattaggaattaattataaaaatctctagattggtacttggagcttaaaggaataaggtggtggaacgttaaatgaggaggaaagaaccagcagagctgggataaaattcatctctatcatcttcccacctgcttgatctctggcatataatttactatccgtgaacctcaggtttctcttcagaaaagctgcagggttgttgggggaaataaggcaattcctgggcttcagtatgttcaaaacagagcattaatattattatagacttttgatgatttacacaattttagctttttggcaagacatatttactagtactaagtaaaagcacgttgactttctaaaatgaaaatgtgtatgtgaggatgaagaaaaagaaagtgttttgtttgataatatagcattataacactgcacaaaaaaaaaatggtatatgcagagacttccatcacttgcttatgatgccgcattgggatctcattaataagacacttcctcagacacttcctttgtgttcaataaatttcaatttcctcctttccttcagttcacttcaagaaggacggcagcaactttcttgttgccaaacctgacaaatgttttttagtgctgattatactcgagcattctgtagcaaaatgctgtgggtgaaaatgccttccttcttaagggaatttagcttctgtagtaccagaatctccttgttgaatgaacatgtactgcctaagtcttagtaatccctcctttttgagcccattttctggcatctctccctttaatattcctcaaaaagttggatttttcctggacttttcatattacagactttcctttggtcatcctcatccattccgtgattccaactacattttccctccatcctggcatcttctttcttccagacttgtatatgcaactgcttccattcatacacttgaccaaccttttaatttctataagatcaaaaactcagctcacaagctttcccctaccatcgagcggggttcttcttttgcttctttgtttcagacaatggcaccaccatactcgagtaaggcacgttcatttatcaggtcctaccaaatctacaataaactctcttgaatttatccacttgttttcatttgaacagtcatttctttacctgggtagcctgcaccttctacctgcattgattcagcagtctcttcaccactggctctccctccctctcctgcctctcttcttgctccttcaatttattctctactcttcatagtgacttttattaatgcaaatatgaccttataactcccttgcttaaagacccactcatgtttgtctttgtatccataacttccggcctagggcttaacgcatagcaggtgctcagtaaatctgtggtagatgaaagaacaagttgtataaatactgaatggtctgatgtgctctttgttgtgtcaagaaggacattttgcagtcaggatagctacatcagtcctttagtaggcatttgacagcactcgcattattcctcaagagaagatggatgtattgattctgtatttcaaatgacataacttttgtgaaataagaggctgccacggtaatctgagggatctctcaagttcaagggactccacagtgctttgtgtaaggtaacaggctaaagggttcagtcttaaactttcttaagactgtagttcagggttcctatggtggggctataaccctgaattacatcctctttcatttcatgctgataatgagaactacaaaccaaggggtattaggaaagaatccaggtttgatgcagggaaaaataaaaacaactgataatctctagtgtccccaacttcaagaattcctttcttctttacaccaagctttttttctctgccaggacttactttgtcttctacatgtttaagggagaaaaatgagttaacagaaggggaggtacagcatttctatttacttagatgctagagaacaggatgaaaggtatgaaaaatatgaaagtctctctctctctctctccccagccttcccccgcttctctctctctctctctctctctgtgtgtgtgtgtgtgtgtgcacgtgcgtgtgtgtgtgtgtcataatactcaacctttcttttctttcaagcatatgttgtggcagagacaagtgtacatcaaaattcgtggtccctctttcatagtatagagttcttgctaggatccagctgcaagccagcaactacatttcccagccccactggcatctagttagagccatgtgactagttgtgaccaattgaatgtgagtgggagttatgttgcaggcataccttttccatcttcttacttcccatttgctaaccttatggaaaagagtcccaaagacctaggagatgaaaaagcctaaaatggaaggactcagagtccctgaattactgggtagagaaaagctgtttgcagatgggaatgcccattttgtagtattctttcttttcttaagccactaaaattgtgggatctctttgttatagctactggcattaacctcttacgtatacatacagctatgtgctacaaagaggaatagatacattttttaatcgttgaaaggggagaaagaaacatatttaggaggaaaataatttagtctctacaattgaaaagtgttttatgaataatattttgttttggcagcatattaaatctcaggcagctgaactacattaattttcaattctctatatatgtttttgtcttcagggtttagtaacactgatatataacagtttctttcttttaatttccaaatttaaatgtctaagtttgccttctaggcagaaattaagtcccattgtggaatgagattggatcaacacttcaccaagatcattttagttctttgtaatcttaaatgaaataagctaataaagcattaaattagcatgttgtaaaacttcgtgaagttttaatatgcttctaagtggcagctcttagcttattatctctaaagctaaagtcaaaataaatgtctcagttgatgaaatggagatgaggcaacattttatcaaatttaacaaaatattttatatctgaattataaagtccagattatctagtaattatcatataaatgtatttaaccagacatgcatttttctctaatcagtagccctggagtctttggaccacaaatgtgccttatctcaaatgctttaactgtgacattttgctttagactagctcgactacttctacagaaattatacacttcattcacattcatccagatgaaaaaaatacatgtagaaatgatcataataagtaacatttgtttaggatttcagagtttacgaagggtttttctattcactttctcacttgttcttcatgtaaactggtttggtggacaactgtcattatccctgttacctggagcccctgggtcttagggagacttcttgacttctcaaggtcatgaaggtgctaactctgaccgtgtttttattcctactgtgccacacttctcaggtaaaaatcatattgcagacactttaagagaagtacttaagaaaataaattcctccagagaattacatttaagttgtttcattaactgcagtgcataaagaaaggaaaagtgttcccaaacccatgtagtattttgctattgcttatggtaatattctgcacacctaatattgtcagcataattttccatgtaacaaaatgtcctaaatcagcaatgtccaatataactttgtgtgatgataaaaatgttctgtctctgtgctgtccaatacaacagccactagatacacatgactactgagcaatggtaatatggccagggacactaaggaactaaatttttatttaatattaaataacgtttaaatttcaaaagccgcatgcggctagtggttgtcatcagatactgcagttatagaaaattagaatttacctctttaaatactaaacctatttttaatagtaggatttttaaattaaaatagttctaagtgcttttaagtgatacgaagtcaaatgcaagatttctgttttaatagtactctcaacccagagacaatcttcatgcatccttatacatgttctttgttgccttattctagttttattttaacattaaatgcctctgttctacttgatattgacttgcttcagagaacaccaagtatagtggaaagaaacacacacatgaggacttgaggctaccaaccaggttcaactaaatgcactctgatttaattgtagtattgggatcccctgttgcatttattgaagaagaaaaaaactttgcaaccaaaaagatatttgaaagcaactgttcttcttggacacatgatccctcataaagtggggcttcctgcttttcagagacttaatttctgttcatattcatttcagcaatagtaataatgatgatggcgatgatgataataatcatgatgatgcctaagtgttgtagtaatgcttcttctgagccagacgttagtcaaattactttctctacattaattcaggcaatcatcacaacaatcccacaggacaggttttattattatacttatttagctagcaaatgatataactaggttaagttacttgcccaaggtcatactgccaagacagtggctctagtgtccctgcttctgaccatatgttatgctgcctatcctagagcttttctcttctaaaatagtaaaataatatattctttgtttgtttcatacttttttttttttttttttttttgagagggagtttcgctctttcgcccaggctggagtgaggtggcgcaatctcagctgactgtaacctctgcccccaccaggttcgagtgattcccctgcctcagcctccgaagtacctgggataataggtgcccaccaccatgcctggctaatttttgtgttttcagtagagacagggcttcaccatgttgaccaggctggtctcgagttcctcagctctggcagtccgcccgccttggcctcccacagtgctgggattacatgcatgagccactacacccggcccatacataaatattttaagcgaagtacacatgcatgatcatcatacttttaataatttcatttaactgtttccaaagaatgttagtatgaggttttctttttttctttttataatttcaacttttattttagattcagcgggtacatgttccctggatatagtgcatgatgatgaggtttgctatatgaatgatcccaccacccaggtagcgagcatggtaaccactagttcttcaacccttgcctgttcccttcctccctccttcctctgtagtccccagtgtctattgttcctgtctttatgtccatgtgcactcaatgtttagctcccacttttaagcgagaacatgcagtactcgttgtctgttcctgcgttaacgtgcttaggatagtggcctccaattgcatccatgttgttgcacaggccatgattttgttagtttttatggctgtgtagtattccatggtgtatacgcgccacattctttatcctgtccaccattaatgggcacctaggttgattgcatgtctttgccattgtgaatagtgctgtgatgttatatgtactttttggtatattcaaagagaaatgctattttcctcttgacatatttatgtcaatttaacatatttatgtcccttttctttttaggagcaccattctcttcctttaacattataaataaaatattttttgcttttctgtttttgtaagtgcagttttattgacagagtgagacatacacgtcgatattgtgactagctgcatgtcttctattatttagaggtctcactcaaatgtagattatcaaattctgttagtgaagagggtagaacagcagaactaatgctggtttccttctctagcattatttgatgataaactaagatgataataccccccaggtcttagatacctgcagtaggacaggcaccctacatttaatgctcctaggaatccttcaaagtgatagcatagttattatacagtaattgagaaaactgatgttcataagttagaaatttttccgaagttgcaaagaaagtgaatggaagaattataccaagttctggccgggcgcagtagctcatgcctgtaatctcagcgcttcaggaggccgaggcgggcggatcatgaggtcaagagattgagaccatcctggccaacatggtgagaccccgtctttactaaaaatagtaaaattagctgggcgtggtggcacgcacctgtaatctcagctactcgggaggctgaggtaggagaatcacttgaacccgggaggcggagtttgcagtgagccgagatcgtgccattgcactccagcctgggcgacaagagcaaaactccgtctcagaagaaaaaaaaaaaaaaaaaaagaggattataccgagttctctttgattccaagcccaaacaaatccttttttgcaatatatgacattgtttccctgtttgcattccccattctgtgtatcacacatcctgtggcctgatcaaaattcattttcagattctgaatttattttccattgaatctatataaactataaagacagaagatatatgtatgtgtgtatacccacgtttctcttccagtgtcaactgataaaaatagatttcaaagtctcaataacctttaattccctttttctcttaaaaattctttagaacttgtacatgacattctgactctagcagattttagaaaacagagaggccattagatattcataccttactattcagatgaagtattcaatgctaaattatgtaatttatctgctttgcaaattgtatggtcagattgagttccacaaaggagagataatttttaatataggcattctgtagcttccctaattattgaattagtttagagcaaaatccttaaattgtatcgttgctatgctcaaattttgtatacttgtccacgtaggctatattaagatttcattgaattttggtttctttctcagtgataattcaatatatcaactcaccactcagatttgcctttgggaaaatccaggccccttttctggatttttagagcagattttaaaaaagtgattctgtatatgtgttgaaattaaccacatctcattgcttttgaatgattgaggtaatgtatacctactactttaaaaaaaatgacttacttagaaggtgtccatagttttataagttccattgaactggtttatattgtatttagaaaggaaaactactccttttatccttaagggtgaaaacctggattttattatacaattaacacatatttattttttattatgaaatatatcacaatataaacgtttacagggagtgtttaaagtggtgttgtccaatggaaatataatgtgagtcaaatacgtagttttcaattttctactagccatattagaaaaagaaacagagaaattaatgtaataggatactttatttagcctagtatatccaaatcacaattatttaaatatgtaatcaatataaaaattactaattatgtatttaacctttttctttagtaagtctctgaaatctagtgtatattttacatttatggcacattgcaatttgcattagtcacatttgaattgttcaatagccacaggtggctaatggctaccgtgttggacagcacaggtttaaagaataatatgaacatctgtgttccaacattctgagtttcaaataagaagaacaccatcagtattttgggagaagctccctatgttaccccttgctaatcaccttccttccccccagagccaaaagtaaccattatcttgaatttctagtaaacaatgctcattttttaaaaaacgtatgttcaacacctgtatttgtatctttaaagagtagctagttttagtttgcctggatttgaactttatattaagggaaccaccccatctctaatcttctctgtgaattcttttctctcaatactatgttttacatatttacgttcatcaatgtgcaactcattgtatgtatataacacaatgtatatattttacatgcgtatggacatttgggttgtttttatgtttttgttcatcacaaaccacaacacacatgtgttcttgtatatgttttatagtgcatgtttaaaaatttctcaacagtattcgctagtagtattgtcaggtcatagggtatgcacacataaatagaaatgattgattagctgcaatttgtagtgcacacatatttgctatgtaagtgatccatgtttaagactttaactgaatttaaaaaatattttattggagccaatctaaatgagctaagggtttgtattgtttacataagcaaagattacacttactgggtcaattcggttgattaactttggatatataaaatatatagctagttgttaaatagatataattattaattggcattacttttgtttgtatataaaaatttcaaaatatccatgacttaagcaaggtaaacacccactgggtggcttaagcaacagaaatgtatttcttgcagttccggaagttgaacgtctaagattaaggtgatgacagggttggtttctggtgagtcctcccccattggcttgcagatagccgccttctccttcatgacctttcctctgtgtatgtgcatcccttgtagctgttcttccttttatgaggacattagacttattggattaaggtcctacccatatgaactcatttaaccttaattacccctttaaaggccctacctccacttgcaggggttaaaacttcaacatatgaatggggttgaggagacctacttcagtccataacagtttctatattctgaagatggtctttaattaactaaacagttaatgttactttactgggaatgtcttttggatgggggaataagctgatgatatgagaagggttggtgaatttctcataagtgtgaaatttgttgggccggcccagcatgattttcaatcaaatacgctttggggacaagtaggttgaatcactacgagaggtttaaaagaaagcaagttgtaattgcaacttttaattgaaagaaagacaggctttgttgatgtgccagcaagactgataactggctttaacgtagatagtaaggcagcagattcaatccactgatcgtgatctactagtgaatttcaaagccttatgcaatagaactacaaaccctttccttgcccaccttgcaggtggatccataggcaaaatgaacatttgcaaaaaagccgctatgtttcagaatttgtgctagggctttaatatctataatttctccaaatcctcacaatttaagaattaattcaacttagccccatgaatagggtgaaaattctgagatttaacaaactaaaataagttatctgaagacagacaaatagaaagagttgagatattctatttgaatgtaaaattttcaaaaagtagaatgacagcgtcaggaattacagtctcagtgttgaacacaagacttaggaacaaatttgctgcatgtaatttcattgagatgggacaaagtacagcatacgtaaggaagttttagaacaaataagataattattttacgagctttgaaacatgtgtaagaaagatacgaataaaagtataatcacatttgactaaaacatgaataccttaaaactgaaaagcactgagattatcattatataattttgaatattttaaaccacaatgctttgggagtgcactgtaatattttagaattggaattttaacttactggcttaaaaagtaatgtactttgttttaaattcaaagattatcttgtaaattcagttcgatctattgaaaaaattataaaattcggcaagaagccaaagaagaacaattatgtagctcaagataattaaattttcatgtttggctttagaaatatattcgtcgtgacatagtacatggtaatctagtgagcccagacaagtagttttctctttttgtcaaagggaacaatttgatgcgtgttcaagttgcttaaataaaattttgtatgtgctttctcatcacaagagaacaatatgatttttgaaattatttttactttataaaagaaaaaaaaaagccctcacagagaaaaaagaaaaaaatgatgatgtctttgaaaaacaaagttaatacagctttacatatatttgacctacatcagggttaatatttttcaaggtgaaacattagatgctggaacttgcaaaaacaggcaatcctcctttagatgaaacggacactctaagggttaattcattcactgagacctattgtgaagtaagccctacagagactgaaaaagttaaatgcaactcacaaaagttgctagaagagtcatgatgttaaaataaaataagtacacaatgtatgctgcaagtatacttagagccatgctaggtgcggttgagaagttcaatacaggtccaagataatagctgcttctcctatagaacatgtcttctcattggagggataagacctgtgtctatgaaacaggcgtaattacatagctctggaactatatatgccgaaataaatgagacagtaagtgttattgtactataaagaatgaagaaatcatgatgagaagtaacagttaatgaatgttttctagaaagagtaggatctgaattggccttaggttgtaagcagagtttatagatagagtagtggtatgtcagagtcactctgggtgcttaaacatacaaatccccaagtctcacccaaatgtgtcttcagatgaaaggaaaaaacaaatgacttgagctcccccgcaaagaacacgggtggtatattgagcagccaaggagtgaccagagtggcaggcccatgttgagggacaaaagaggacaattagaatatgattaatacaaatttacagtgggatgagttgttagcctgaggagcttgaatgtgaacctctgtgcaaaaaggagtcattaaatacttttgaaaaaggtgggatgggaagaaaatgacattctcaagacaattagatcgaacagtattaagcatgctgacttattaagttatgcaccttgagagggtggaatgagggaaaagggtctttatctggagtaagacaggaagaagctaagctgtaattcttactggactgtaaattatgtgcagatatattatctgtcatgttcgtgggcgcattctcagtacatagcacttgaaacaggtactcgataaattgtcaaatggatgcatggagtgatttccatgcaaaatctaatattgtatagtattagaagggggaaaaaagcatggcattatgctagcagaaatgtcatttggtattgaggatgaaacattttcaacagtttgcaaagccatccactcaaacattctgtcactttccaataattttgaaggatgttctttctacttctaccttattacacaatgagttgagtaagataaagaagtcatgtgcaacaaaacagagggagattttctgaaaggcactacaccaggaagttgttgtactcttgcttcatcttgccatcttggatatacttctggcgctacctccaggccagttcctcgttacatatgtcatttacttcccacatgctagactcaccgagttaatcattttgctgcagttaacacattttagcagagtgtaggtttatgggtgagaaggaaatcaatgatgtttcaatacagggttcttttcccatcccccttatttccacttagaactgtctctcaagtcttaatttgcctctaaacttttttcccagcttacattcttttctgaaaaatgcaacgacgatgccaatgtttgttgacctgaaatacattgtaaaacattcataatactttgagcagagcttccaaactcccatttgcctcttttatctcccttaccttggcccctttttgaaggcaatgtgatatttaatccgtttctattgatgcttcaaaattattgaaaaactggtaattgtatttttccctttacttatcagttgctagttgacaatgagtgtttgcccaaacaataaccaatcaaaaggtaaaaaggagattccagacatatctgagaagaaattctttggaagaagcccgtaaatggaatgggaattcaaacaaagccgtttccaaaagaaatactaaatggtctctaaatgcaaaaggattgctccccaagcattttatgggagcataaaaagctcccaacacattttatgacaatacttctactcaatgacttcttgtgttgacatatttgttgcactcgacgttagtatttacagcttcttatcccaaatatttacttaactgaagccctgatgtttttaaaaacttttcatctgtgtttaacagcccattttacagaaacttatttgtttcatcaggcagatatttactgagaacttgcaagtgccatatattctaaaaatgctgatgataaaactgtgaacacaatagattctcatggtgcttatggtcagggctagcacacacacttgtgaaatgatcactgatgatcaaaggcataaacactacatttggaagaaataccgagggatccagaagtatcttggaaacactagcaagtatagcagatggtgggattggtgcttcaaagaacttcttgtggaagatgttacgtatgtaccttctctgtgccaggcactgctaggaagtgctggagagaaaaagatgtgctagataccgcctctgtcctatgtgcttgtgctttgtggggaggtgagtaggataatcccagttctcatgcagtgtaatgagtaccatgacggaaatgcactccaagaactaggcagcatgaccagagataggacatttgagaaagacttcactcgggtggtactatcttagtctgggtgctaaaatagatgtgatagatgagtaagggtgacccggaagcaggagggaaagggaggggctttcagaacaacaagtgcgaggacattaaggtgaaatagagtataatagtattcccagatccttgggattgttctccattaggctaaaacaaaggtgttttctcttctttaagatttcatgactgcagattgcataacagaaggtcatttaatagacctctaaactgaaggaattcttgaattaaatcacaacatatcttccatggccagagaaaccattgcctccttatgtcgacattactaacagcaccagcacctgctgctcaggccagcgggagggttgggtgttgctgcctaggtaatgctcaccaactgatgtcctgccatgagtagttttgccaagttccacaaaaaaaacttagtgttctatcagcatctaatgagaattacagtcattagttaaataaaagaactattagataaggagcagaatgaacaacacacaatccatcagcttggtgaatggtatcagatggtttctgggtgctgggcagctgtgcatccaagtagacagggagaatatatatgtcctttgccttatgtacttgtttctctaatccaaaggcacagcaatccgtggaagctgctatgataaggtgtttagtggtgaaaatgtcttgaaagccagtagattattaaagtgatgtttttaaaaatgcagatggagagtaagtactttttatctagagtagtagttctcaaagggaggtcccgggatcagcagcgttagcatcacttgggaacttagacctgcatgggccccattccagatctcacttgaaaactctagggggtgtagcccggcagtctttgttgtgaccagctctccagggggttctgacactccaaatgttcaagtttcagaacgctactcacaggccatcatgctcggcatcacctgaaagcttgttagaactagaaagtcttggccccaccccaagcctactaaatcagagtttttgggagtagggccaagaaaactgtgggttaacaaggtctccaagtgattcttattcatgtcaaaatttgaaaagcgtcgatcgaactgttggttctcagctttgattgcgtatctgaatcacctggggagacagttgagctattccgggcccagatcacatctagaccaattgaatcagaatctatggaggcaggacccagacatcagtattttaaaatatttcttgaatgatcccagagtgtagctaaggttgagaaacactgttctaggattaaaggattaatgtgtttgagagtatgttaagatcttaggcaaatcacaagggtgttaagaactaccatcttcgcaaaaggagaatgtgcctcagatattctggtactgctttgattttaccttcagtagtcttacctattttgagtatgcttagtagtactaatatgaggcttattactaatatgttaaaatttgtcttttaattaagtgggtctaaacgttttaatctttaatctctgacccaactagaacttttctaaacattttcataatagtctccaccttgtcttctgaccttcacttatgttctttcagggttcttcgtgtgttactagtaatagtaatggcaagtgtttattgaacacttactatgtgaagattctaactggcttttaataatcacatcagctctgggaggtagaaggtagggatcctccttgcttatcaggtgagaaaactgtactatagagaagttagcaacttttcccaggtcataatatgtgacagctaaagggagcataatggttggaataaaataaatctactctagttgtaccgaaggctcatatttgtctcacgtacttgatttggtcgaggcccaaggggtcaatttccaatgcttggattcctggatatgtagagttgtattaaaaatgctaaaaacctattatgtatcatacaatcatacatatcacctaaagtattatggaaatgaatctgtattattaagggaaaaaggcctgtgtgaagaacaactgaaacttcattttaattgaaattaaataacatgcatcatacactaaaagtgcacgttatgaccccatgaattacttcaggtggctttgattcatgttacatacactaacaaatatagaagagtgatataatgcttcttaattaactactaatggaagtttactatttaactgcttcttatgtaagaatgtaaatgttttctgaaatatcagaacttttcattaggaagcacttttaaaaatagcaaaactgatatgcactatgatttccatatacattaaattgaacttgtaaatgatgttataaattatagaaaccaaggggatgttcaaattagatatttgtctaaataaatcatgtatggattgaacaaatactcattgagaaataaatgtattccttttctttcaattatctaggattccttgtttatctcttcagaagcaaaatgtcttctgtccgttttatttccagttaaacattcttcagattatgtaaataagttaacttccaatcctcttatttctgtttatctcaccactcttctaatttagacgtgatcaatatcttatctttttgcatttcatagacatcaggatccagaataattgagtgagctcaaaacaacaatggcaagaatgatgttttcagaaaactcagcaatcattcgtttaataaatattcattgcctaccaactataagcaaagtattggctaggccatgtggggtatacaaaaatgtattaaatatggctcattctccctaagaacttacacctattagacaaagtacatgcataaaaattataatgtataatagaaaataaatacaagccctagaatgcacagttgaagtacgatttgcatttattataaaaagaaagatgaattggctgggcacggtggctcacgcctgtaatcccagcactttgggaggccaaggtgggcagatcacgaggtcaggagttcgagaccatcctggccaacatggtgaaactctatctctactaaatatacaaaaattagccgggtttggtggtatgcacctgtaatcccagctacttagcaggctgaggcaggagaattgtttgaacctgggaggtggaggttgcagtgagccaagatctggccattgcactccagcctgggcaacagcaagattccatctcaaaaaaaaaaaaaggaaagaaaagaaaagattaatttcctgttagctaaatcaaggaaggcttcatggagaaaaaaatatttcaacacacacttgacgtagcagtgggatcaggctgatgttagggaagaatgaatgacattctacactgagaaagagatattcagtatatatatgaagagcagtagagaaactaacaagtggaaatagactcaatttacaatacttgcctgcctggagtactctatacgttgactgtaagttgcagtttactcagaacaatcccactttctacttgtttatcctatgtaatcatttattgggcctccttttgctctcaaaaatatccttgtttggataatagattatcactctgttcctaaatgaactgccctgtgtcctatcccagtaaaagggtgcattcgggcccttcgtaactgcctccactacatggttgattgaaaccagagcttggcattaagaagttagctgaacaatcagatttctattcttggaaaacccaagaatttcagaatagatacagaagctgtatagctttaataacatgacagagttgtagccttgaaagctatgtacaattcagaattatgagggagaagaaattgaagaaacagtagcagccgggtaaatgcagaaacaaatgagggagacacctagggggtgactgaggcacaataatggaagagaagtgcagtgaaattgcttgaactcttactgatgagatttctactgttgccttgaatccaggaccacctatatgttcattctttgtcatgctcagagttatgacagatgctgttattgaattccccagagactcccttatcgtctcacctcaaaccttacaataatcccttctatctttctatccatccaagctggcttaagtaaagtctatgatccatattcctagtaaacagagaagggaaagagactgaaggcaaaggccccaattagtaggctattgcaatatttcagggaaaaggcaatggccatcacattgttgtcccaggaatgagaatagaaatgaaagaagataatgaaagttgaaaggactgggggggcttgacaactgtttagacttgaggagtcagataaaataggaagccaaagataattcagaatattttgattttgattttcatcaccaaataagatagtagtactatgaagaaaaaatggttaaaaaacaataataataaagagaactcctccaaatagtaccaagggagggagtttaatagaggaaattaattccgtaggtgatgagagtcctgagaagccaaacgagaaaagatcaaaacaacccagggattggcagtcgcaggaagctgttctcacttatggctggggctttaagcacaaggtgacatgagatttcagaatttgaagtcgtctggaggcagctaggatcaggtggggcctgtcctgttcggcaggacctgcaaccacaggaggaggatgcgtcaagcagaaagttggaacacaagaggggattcagccataagccacaaaataccttccagagcagagagaaggagaaataccctgaattccgtattttccctgccatttagttccctgctattgccacacattgacgtattccatccagagaagtccattggcatatgagtctgggaaatgtagttcccagggggacatgatcttaagggaaatagacaatgactggtgcaacaactgacctgtgtgaggcaggagggaaaaaacaggaataatatagtttttctctagatcccttcatgcacaaagatgcaaaagaaatgtgttggcttaatgagccattctgggtggccctgtaggtggctgtcctacgaataagatttttagacaaaacagagatgacttcaaatgtcacaagaaaagtatcagacaggaattaatattgacttgatctgtcacaggcgtcaatgatttgcattaagccaacgatcttcattgttaatgtctgggaaattgccagcagcattacgactacttgtgtggattagtgtaacggattcccccactaacattcaggaaatcatgtcaagcacagagtgcctatgtaagagtggttgtgtctattcactacatttcttggactaataacacacttagccttcctgaattgccaacatgtacaaaaccagattggggttttttagttgttcatggaactatcatttattgggtagctcctgtagaagcaagatacagaaactctaattaggaataagacagtccctgtacttcaaagagctctcaggggaggcacacaagtaaacaagcaattattatcatacgttaggataataccgtcatggtgataaccactgagtgatagccaaacacatggaagaggtacccaagtctaacttggggtagtcagagactgctttcaaggatatccgagtaagtgttagctaagacatgatacgtatttctaggagggaaattttcaaggcaaggtggagattgtgcagtgacgcccagagcctggattattttggtgactgctagtatttcagaatgacttcagcaaaagttgtagagaagatagaagacaacaaagtataagcagaggccagataatgaggacctggaacagtggtttgctggtaaatgtttaacaagaggctcttggcggggagagagagtgtctgatttgcagcatttggcaaattttgttgcacaaatgctccagcatagccaatttcaagctaccagtgtgacgtcattgaatgcagaattggaaagaaacgggcagtagcacagcattgtatagttattttcattacccagatataatagataaaatatccagatggtatttaatagatatggatgcaaaatttaaatatatgtacattcatgtgcttcatgttactgaatgcgcacaacattcattatccattcattcacgtgttaatttaacaaacatttctgagcctctgctctgtgccaaacgcagttctagctgctggaattacagcactgaaaaaaaaaatttgtcctcactgaggtaagacaaacattattatgcccattttacagctgagaaattaagacatatgaggattaagcagtatagttaaaatcacacaattggtacatgaaggaatcaaagaggaaatcagctctcagattttaaatccagggactcgtttctgctataccatactacctacctagttgagctggattttatcatggtttccctatttttatcaccatgtggttggataagtaaaataaatatatgtgacctttcaaataaatttgggtcatttttcttggaagctcatctggtgtgaactttaaaatactgcaattaataatgattataataccctggaactctgtagcaacctcttttgaagaactccaaggagcctctaaatgtatcaaactaagttcttcaagtgaattagttatcatctgagagtaatatagacttttaaaaatgcattaattgtattaaccctttcaggcccatagacttaagtgtttctttctccaaataaaaatagtaatctctgtccattttctttagagaataatgaagtaattttcattgaatatgtagtcaacataattacttcaattcaatcgtgaaggattttaaaaattatttatgtctactaacttaaagacatgcatagatttcaagaacttaaaaatgcatattgcctctttgccctatgcctcataaaacaaaattatgataacgttgtgtgttacagaaaaacgcactgattgtaatgaagggtgcttcaaaggccatgaacttggaaagcaacttatttacagagacccccagcaatagcagctaaaagattgactgactccctttattttcagttatccttcagacacttttgacctcttcctgtgcctttctagtcatgtgcaatcttgtggatatctcttccttcctcttgttattttctatttcctctgtttctatttgtttctaaaaataatcatgtttgaatataggattagcttccttcccatctccccattaccaatctctcactataccgctatgttattaatcttcctgagaaatatatcaggttcattacattagttaccagctcaaaacgtatcagtggctttctagtcctcacaggctcaagttaatctgcatattctgactttcatattctgggttcatgcaaacttttcaactttccctcttatacctacttaggaggaccctcaggttccatcatgctcatgtttcaagccagaagttctcctgcctcttcctctatgtagactccacatagactatgatatcctgcttctcttttaatcctccatcttcagctcacagccacactcctctgtgaacagttaaatgattctcccacctcttacctcctatagcacttatttttcatgcagcatttttgagacttaattaaatctacagttttaaaaaatgtttttctaccacagtctcttattcatactaaaactttcaagtctatccattttgcttatacaaccacaccgttaggtcttttaggtccaagaatacaagagaatggcaaagcacgttgtttacatccacacatactgtgtaaattcaggtaattttttttaatcctatgatcctcaattacctcacctgtaaaataggtactactcatactgcagaactcttgttggaattaaataaatgagtgtattaaaaatgctcaacaagatttggcacaaaatcggtactcagtaaatgctaatcattattccctttctcttcaaagctccacaattctgtattcatatcaccctctttatatcatttgcaaaaatgtatcctattccaactctttccacctagcctcaacatttacaaacactcctggtgggaagggaaagcttttgaggagagcacatctatactcatttacttctcagggatgcaagctgccctgcttactgagggcatatgttcatagtcacaccggagcccactgtccccttatactctcaaatgggcagtagcaaatcatcttgatcggtagtaatgacctgtctctaaattttcacatgcatcagataatttcttttttagtaagtgttatcttacatatatgccaaaatatcaccattatatggaacactagctgaaagaaaaattattcagtagtcttaattttctagctaacataaattctctccattttcatcatccatttagattaaagactttactgttagctgaatattcagagactttattctgatttttaaaatttatgaggttcataatgttaagacttcaagggtgagctgtttgtgtcatttataatgcgtgactagacagtaactagaaaatggattgttgactttacaagatttctccccaccacgtccccccaaacctgtgctgctgtgtatttggcctgaaatctttacttctagtcaatctttggacctaaagcctaccagcttttagcatcctttaagattgacgtgtctctgggagaccaatagatgctaaaccaaatttcgtatgcacttggcaatataggataataacaaccatactccctgcaattgtttcctaacacagatgtaacaaattaccacaagctgggtggcttaatagacatttattctctcacaaatctggaagctaggtgtccaaaatcaaggtcaattatccctctgaaggctctggggaagaattcttccttgcctcttccagcttctggtagccccaggtgttccttgatttcaagcagcacaagttcaacatctgctcctgacctcacataaccctcttctttgtgtgtctttctgtgtccactcttttctttattattattattattattattattattattattatactttaagttttagggtacatgtgcacaatgtgcaggttagttacatatgtatgcatgtgccatgctggtgtgctgcacccattagctcatcatttagcattaggtatatctcctaatgctatccctccccccctccccccaccccacaacagtccccagagtgtgatgttcccattcctgtgtccatgtgttctcattgttcaattcccacctgtgagtgagagtatgcagtgtttggttttttgttcttgcgatagtttactgagaatgatgatttccaatttcatccatgtctctacaaagaacatgaactcatcatttttttatggctgcatagtattccatggtgtatatgtgccacattttcttaatccagtctatcattgttggacatttgggttggttccaagtctttgctattgtgaatagtgccgcaaaaggacaccagtctttggatttagagcccaccctaaattcatggtgatgtcattttgaaattcttaactaattacatcttcaaagaccctatttccaaatctggtgacattcaaggtttcagggacatgtgactattcaggggaaactattcatcccaccacatcccccttgaaaattctggaaaatgtagtaataaaggcttctgataaattagtgtggaaagtattcacggttataaattactaaaaagtctcactgtgagctcttaatcaaaaggccctataaaacatttatttgcttgattaaaactacacatccgatattttggttttggatttattattatttttagacttggaataactattttatgtgaaatagattccataactgaagcagcatacctctcaatttcccaacatttattttattattttttgtcttcacactacttaataactgaggaaaaatcatttagaccaaagttcaccttggttgacaccatccagacagctacaggaaataacaatggaaactaaatctctaagaaaaagagtctttcatgtgaaatattgcagagttgattctagatatatagctgttggaagaatggatactattacatagatatggcagagtggtatccagcacctttcaacaaagatctttcagagtcagtcttattatgtctggagaatttacccagggcttaggtgcttttactgacaatctaaccacctgcaccccacccaccgtctaaagctaaagtttattggaagacttaggaaatcagtcttcggaatgtttctgagactggtacacccaccacttcattaaagtgcttcacttcacttcattagacaagaagtaaaatacttgtcaggaaattatttatagtaccatgtatatgggtatcttatttaatactacttaatgatggtactacaagttatataaaatggagaaataagtcatcaagtttgacaataatgatatttgatattatcattatcttttttattcgttcccacagaagtactctgttattggtttagaaaaatgatatttgatataataaagaaggaaaaggtggtaatattctttattttttgtatctttataccccagctctttcaccaatctcccccatctctgtagttctcctctggtgtccccaggcagtgaactattcccagtggttagggaacatctcattgagtaagttacatcaacatttcttcacatttcaggacaacaggaacagtgccaaatcctagcccattgttcaactctcaagccttattatcctaataacacatccatcccaagaaagaattcatcaagatcagagaggaatacgtataattttttatagtacagtatttaaaatgaaacagcttttggcccgcgtggtctcagtgggctcaagggggaaattcaggatgctagctcatctcacaccaagtttaataaagggtgtcctataaaaagctaatttcttgctggtaaattgctttttaagtaatccttgctgttgcaagagacccattcatagcgctgacactgggagccatgttggaaaggctagatatgctctgggagataaggtaagatccaggtggaatcttctctttacagaatgacaatgtatatagctaatattgtcctttgaggctagtttgcatgcagttgctggtatggcactgctcagcagcctgctgcagataagaatgagtgatgatgccctagattttaatggaacttttagagtgcatgcagcagtggggtgcagtcttcagcaaagaaaaacgagctgacttgcaggcatgagagatcatcaagaaagataaagaaataggacatccactctaggttaggcaaggctttttagaggatattatggaaatgagcaagaaccaatttaatttttataatgccactccatttaactttaaaatacaaggtcaaggtactgtgtttttcataatgattaaagatttggagcactctttctgttgaaacatactgcatctgtttggcagaaaaaaaaagtgacaaagaataaaactgggatcagagaacaacaaaaacatattctgtcacttgcctaacacaagttaaaaagcaaaggaaaaagagacaactctgatggacatgttcatccttatcccaacagaaggatttatttacctaaggtcctattatttcaagttactttgatcccaggatggtaacataaaatgtacattttaaaataaaatggaagtataagatcaataaaaaccacatatctgtggataaaacagcagattcaatcttgtggctgaaagtttgctttaacccaacatttggtaaactattcactctgtaatttattaaaagacatactgttattataaaactatctcagtttgcatcttgttggttctgtcaaaatttcatcctgctaattctcaacttgtaatatctctgatatacatgattaatctattttaggaataaaacaaaaactacctttatcttacgcatttctaggaagtgtttttagatgtaaagtaggggtaattgtagtatagtggaaaggattttgaacttgaagccagaacatatgtctctgccaaaaactaggtgtgtgaccttaaataagttacttagcttcctgaatcttagtttgtttagcttttttctataaagtggcacacctatccacatcacagttttgttgtcaaaattaaataaaatactatattagaaagaaacttttagaaagaaatttataaactgaaatgtactatacaagtttaaatcattctcattattttcttaccctaaaattttgaccttatttttcttagcaaatggctgaatctgtaaaatttaacccccacgcagcatctggattcaagagaactacggtcatttctttatacagaatactaattatacacatatagcaaaacacaagttttttccaactactctgtgtttttaaagattcagtgtgggcagaaggaattttatcaactatgttaggggaaaaaagtctgaagaaatgaaaataatgagaaaaagcactgttgatttaagtgcaggaacataaaacttcaaggcaaatgtgaggccaactgagttcatatatatcctcacaaaatgatttagttaatttaaaaacttttctaataagcaacacaggtaatcccaaattctatcttttatagctctaagagtccccataatttattcagcaattatttaccacccacttattataagaaaagccctgggataagtcttgagaagaaactaacaaaaacaaaacttgattgtttgctctcaaaaagctgggtctaaaataggcaaggtaagattttgttttgaggagcccgtattttccagcactgtccattgtaacattaaaatagtttgccaaaatcctcactctgtgggtgtatttgcctagggtgctaaaattgcttaaaaactttgttatttggctaactaaaatcactgaatagtaaacagtagcattagagatggcagagacattaggtgtcatgcagttcaactgcttcacctagcagacaaagacattaagttccatttcttaaatttaactatctggttgaggatacacagtagcagagctaaatcaagaacctcttggggttagagtttttgtttatgcattactttgttttggaattaaaaacagtgcctgtttgctaagttaaattgaaaatatgctctgaaggagaaaaacagctataaaaatagacttaacttccaaactatggatcacaataaactaaagaaataatttctgtagcaataaactccaacactttccataggaccagaaaggcttgagaaagaggagaacaaaaaaatgctttggggcttaccatatatatggagaaagctaaatgaataaaccagttgaaagacagcgagttatactagtaacaatattactgatatcggagctctcacttataaattgtatattatgatcatagtgactaggtactttatatctgctttctcattccttcctcacattaattcacatgtaggacagattacctcttctgtttctatccagaggcctagagctcaggccctcatcgaagacagacagagctatcatccttattctaaaaaaaaactaagaccccagacatagctgtgctacttatagactagaatgtgagagaaaaagacaagctttcatcatgggcttaacaaactgaaacacttcttcaattttgagattgagaaacttagctaatgctaggtgtaaagatgatatgctaccttcataaccttggtgaggagaaattagcatttctctcagtcctagaaggaggatgaccatgaaggtcttcattctcttgagaagataatcaaatgcttcactgccctgttaacggtttactcaatattcaccaagaaaagtagatgggattatttttgcagacacttatacgggtaatttattctgataagcagagacatacctttagtgcataaattgttccctttgtgctctttgtaataaacatcaccatagagaacaaacacgaagtaatgacattgaattaaaagacaccatagaggcaacagcgactggaatttgtgaaagtaaaaggatagtgcaaacagttgtgcgttgcattctgctctgaagattaacaagctgggtcaggctttgaccatcatgatgagcaggagatttttctaatggaaatccccaatcaagttcctgctgcacccagaaaggaacggcttacagaaatcttacatttctttgcacataccaaattgcttggcatattctatcacaaggtttactttccagggaatgtgatcaagaaatcatgatcctaattcctagttaaccctcaaagtttctcagaacagtcagtgcatcactgtcaacttttgtgcaatgtggaaatcagaattggtcacacgtttttccggccactgttttagattcatataatattagtgaaatcatgtcagactggtatagccatgaatttatacttcatgaataggcactcaataaatagtggattaaatcgaccgatttgatttttacctccaataatttcaaaaatatcattgaagacaaggttgttgaagctgtcacttttcttgctgaacctttgttgtgccaggaggaacagatggtaaaatcaaaagtgattagagaatcagtggggtgggggtgagattggaggggagaggtcttcccagtgagacccgctagcgtcttccctgagcagtatgttaacccaagacaattttagaaatctgtgcccctaagttgcttgacatccaaagcacacttgatgcatcctacatttctaaatatttttattgttgtttctcggtagtaatcatctggtttagtcactctaaaagtcaaggatgaaattttaaaatgcaaataaaagtgcctactttctctctttccaattcctttttgttttattgaggtataatttacatgcacaaaaaaatcgcctttttaaagtgtacagtttgatgagttttgacaaacatatgcagtcctacaaccacgtccgtgatcagaataggaaatatttttatcacttcaaaaagtttccttgtactcccgttgcagtcagtctcctgccccaccccagcccctggaaaccactgataggtaaaagcacttttaatctgaaaggtatttaatgtatggcagtgtcagtggtaataataacaagatttattcattggttcactgtatttttgagcacttatatgtgcccgttgtatgcaacccattatgctcaacccctgccctcctcaccagggataaactagtggcagagatagacaaagaagccgtctctctatcacccctatcttatagaacattcttcaatgttagaaatgcagtataatgtggccattgagaacttgaaatgtgcttagtgggaatgaagaactgaagttttaactttatttaatttcaattaatttaaatttatatagccacatgtggctaatgactatcccactggaaagtacagcttctatacaatatgataatatgatacattataacgcaggagtttaaccaagtgctaaagctttactatcaccagggtcactggtgttatgtgaaaagaaaacttacaatagaaaaataaatcctttaaatagtcacagacctgagaaagtttccttctcaagggaacacacattggctcattcaaaggaggttaaaaactagcatttaaggtaatttcatgaagctttcctttggatttctcatgcttattgtatacataaataggcaattttcgatgggacctaataaatcactgttttttatttgaacattttaacaaaattatcaaacagcattgcatttatgttcaacctatttgttctgagaaagacaacgattaagtagaagtcatcaaagttaccagaacaatttttgttcttatgttttagaaggcattgaaggtgtttaaaatgtacacttatagagtcagagtactatgcaactgtggcccttatagtttatccgtcatgcatctaaagccattgttacatctgtttctaattgtgcatggattgtccaagatacacaattggaaattccattttatttatcaatttgaagaggtttcacccatgtggtcactatgatcactatggagtcacattaaattgagaagtctccagaagttgcagtatttatttaaaattctaactttcttcagaggaacaaattctccatttctggattctgaatcctcattagccataaggttgttgtaagaatttgcagctaataggaacacatcctggggagagaccagttgaaaagtaacttggttctgagtgaaattatacagagacagtttctacttcaggtggtgttgctaatgaagctatcatggtaattttagcccatatgatccctaaacgacttcagaaccacttttcatccactaagaacccacttcaaccactgccacgttcactaccacagtataatatggaacaccctctggaattcagtaagtaacttcttaactcattggctatagagctttgcctttgtaaattctttccttttgcagtaaaagagattgtttcaaagtaatccaattagtccctaggcatgtctagaaaggtagagtcaacaacagtaaggtaatagtccttataagatatgtaagaaattatcagtcatttactttaaaataatttgtacacttttccttttatatggttcttctatgttgaagccagtggtcatccagtgattaagattagccaaactcaaaaggctaaaactaaattcaaatggtattattttgctttaattttatgcaatgctatgtatttaaatttcatgaaagtttcgtatggcattgctatcaatttcagtcaggataaatttcccgtgaaataatccacaattttcaactgtacgttgggtacaggtaaggaaacacccttaagagcttatccagttattagctggtattataaatttcaagtaattcaatgttcaattaataaacagttactttaaatgggaaagtatgagtcaagagttagtacaaaggagaatcttaaaagatgaacatcaaagaatcttactattgatttgttggtgcctttgcttgcacttctccaaattgacttgacgttttaaatttgtactgataatcatcagagtcaaatctgcttttaggcaaaaagtatccgctagttattcccctactatgaaagtgatgagatgaattgatcatgtctccagtgtatggatggatgtctttgaggaagacctactgaccttatgtttatcttctgtcagcatggtgtgactatgtggagagacagtgctatttgctaaatactttgtttttcaaataaaaagatttcacagattatgcattgtagaatttataagtattcttttatgtctttgaatgtgccaatacaatttttatgaagttggaactattttatctattttaatgaaattgtaagccttctgtgaattcttttattaattttattctgaagaaaatctgaccaggttagggaaatcaggtcaggttacgacgtgatcccagtggaaaagctgaactgtggactgtgatttaaaatagggaagaggtactgaagtgttgtttttatttttgtttacaaatcagcctttctaactattatgtactcccatccttctatctttttctccaccagaacgtattaacaggcatgcatataattaatgcttttcttgagataatattaaaattaacttcatctgtcaggccgtctgggctaaaagtacacagtcagatctgggtaacatttgagttgatgtaaatatgcccacacatactgacaatgcttaccatttattgtgtgaatgaaaagcagtgtaaatattgtttgttctactagggaagctccacattttaatcaaactttgaccgtatttctaaaatgccagagcatctggaattgttaaaggaactgatagtttttgtgtttttaactgttaggatacttgaaatccaaagggtaaagaaactcagctgatttatacgtttcttcctctttattttaatgtgataaaatgtagtttttgtcatgggctgacaaacagtggtagactacactaactctgcgtttgctgggtttaatcttaccctctcaaggcatggaatgggagctcacttcagacccagccatgcttcactgtccactgccttctcatggatatagtgtgaacattaattagatgaattccataaagtgctttaagctctttggagaaagatactcgctgcataattattcttaactcccatacgctcttatgatataaaccattctgccaggaaatcctttttagggattatcacttaaaatgaaattttcattattaaaagcaggaagaatatacatctactgacagacgaaaatgtgcttaaggcgactgcttttaaataggcagaaatcctgaactatggagccatccatgcctgaaaatactgagtaataatgaaaactggtagcaaatttggaatattaatcatcacattaagttgcaaagaaaaaaaaatacaagccacatgccctttaaaaatacgtgcacaaatctttattctagaaatatataactttaggcctaaaaaagtacaaaaagtaaattattttatggctctgaaagtatccttaatttactcaggtgacaacaattagtgtttaaagagttagttttcaatcttagctacaagttggaattactctggaagctctaaaaaaacaaaaaacaaaaaaaaatagagatgcctagttcccacctgcagaaattctgatttgatttttctggtgcgagacctgagaataggaatttttttaaagcttccctagtgattctagtgtgccacctaggttgccttaaggtaaacctcatattatgcagaacctagcaatcacctatcctgattttatagacgaagatcataagacccaagagggcaaattgatttattcaagattgaatatacaaatgatagaagattcacataagatgcagtatacagagtggcttgtggattcttgccaatgcaggcagcagaattttctttagggttcacccagttcaggcacctctttgcagcagcacttgactaaggttcttctgattggatcattatatgggcaaaaagaaaaagcttaattgaaaagagctgaacccacattgtggaatggaagatatacagtttacacgttataaatgattaatattcatgaaagcatactgccctttcctcttcccttcccatagatgacatcattgcattggtgtagttaggttggtggtttcttgttgttgatcttggttctgacacagttcatcacttattatcctggcttattatctacttctacattcattgttcactcactcactaattaattcaacatggtttttattgttttggaccggttatatgcctgcaacgctacgtaaggctgaggatattacaatgaacaggaaacaaccctgaagtttaaggtatcaagcctttgagttactgtcttttatcatagctgatataaaattgaagccccactttttttgttttcaattactgaaaattcagtgctaaaaaaatgtggatttttattcaactagataaagtactacaattaggtttccactgaccttggctgtttttgttcccagttgccattacataaatctgtgccactcacaacttaggaagggtgtaacattctctgtaatagtttgcctttcgaatagtgtttggattcattactgtccctcgcagtttggaataatgaccactgaataatcagtgtttggagactaaattagtgctgcaaaattccctcaaattacctactgttcttttccctgtcgatgtatcctcatattcactatgattaccctgagaagaaagatattgttgagaaccactttacctactcgaagttttggtatttcaaagattcatacttatgtcatgttgattacattagcactaatactattggcagaattctaattcacgttattttctttttttccaatttctctccatgcctatgtgttgtcccttcgcagctataaagccatggccgattcatgggtgcttttgttaaggcgttcagcagtcacgtttgtagatttttgaatgggacttagagcccttttttgttctttatgtatttctctatttctcagcaaaggaaatgcagacatgcaagaaatagtgatcaaatgtcctgtgtactattgtgggtgtcattaatggtatagggagaaatagaaaatagttgcaaagatgcatttaacaaataaacgaggtcttgagattcaccatgaatgtggccccttctatgaaaagtagttaacatccaactgcaaagttgtactggatcagtttgactttaacctttagctaatatgaaaatatggaattgtgtggtggtgctcacaaaaaagaaaactcatttttcttaattatcatcaattaacatgtactgactacccatgagggaaagttaatttgctcttgagtggaaccagttatttgccctattatttctcccttgcttattcccctctccctccctcctccctttccattcaacaaagaaaaatagataaagcaatttctgattagccagtgaaagcctctaacataaaatttccaaagatgtgccataaattatccacaaaatgtaaaacttttcaattttggtttgcattttcttttttcttattataaaggtaataagtgctcattatagaatttgaaaaatataggaagttgcacggaagacgaataaaatcagccataatcctacaaacctattgacacttgtacatatgtttgttatctctaatgcattcattatgataatgcatcttttcaaccaatagagtaatcactggtgactttcaaatttgcctactcatttttcactctgtggacttactttactacctcttgccctttttcagtaaatgaataaatatttaagtaagtaaatacaaatgtaataacttatgcgctcaagcacacagatacacacagagagaatttggaacttcggaaatgccatcctctccctagggccgcaagtgagttgataagcacgtaaggaaggataatcaggggagccttctcgtattgcccagatggctcaaaattcgtcatctctaccaaacaactatttggagctttgaagaaatatccatgacccctttgaattcttcagtttctttcgcgttcactttgagaaccaagtgacaagtgaatttcctgacttggtcttttaaacctgttagcgcagttccattgagattttgtgggcacaagattgcaatgaagagatcaacagggagaaattcatttccctatatatgtgcgattaatccggagtgctaagggcagatataaagcaggtgcctactcctgtataacttggaataaaaccatttccaaaggctgatgatcctcaagtcttgttctgcaaatgactgatgtataacttcaggccaatttttctccagttagtctgtgtcactgggagtcccatttctcggggagcagccccatgctttgtcaggtgcggagcccacagaaggttaatgcgaaaagaaggcctcttgccagactgttttccagatgatacgtagggttattagtttgagctccttaagaagatttttctcacctgtcctaccaacttatgtttatttcattggtgttagagggtttcagtggcggaagtaaaatatttagcggggaagggacagcgttcatgggaattttgcctaacttaattttgtatctttagctcattcgtagtcattgtactttgtgttttgtcaactgaattttgtttgcatacaaaggcacaaaatgtttgcttcagacctgtcactcttatttttagcatggttagacaaaaactgagatgctttaattgtctaacttatcccagtttaagtgctgcaaaatctcccaggcaatgtcatgggcaactaagggataaaatcagagatttaaaggtgccaggtttcccacgcttctaacagttggcgttttgggtgtatacaatccctcagctttcttctttagtttatggagtcttgtggagggaatagcaggtttttagctaaaattatcatgctgtcgagttgggtctctagtgcatcctgaagagcttgcattatttacagaggctgggctatcattttaaatcctgatgcttcaatgcccgttatcattcttgacaaactcttccagcccgtggtctgttttcctctgtttgcttccatttactttcctgagcaaccagctgagcaaagatttacataacttttgtttaaacaaaccctgtacagttcactctttcagccagtatgtaaacacttttgagacacagttacatttttctattttagtcccagattctgtttatttgctacattttttgtgcccacatttttgtctttgttaagtctcttacagattcacatgaaaaaccagaaaccgtggctgctcaaaagtcattaataatgagatttttagctactgtttctgcttgtaaattcttcatttcacataatacagtctcaaaaggccacagagaattcagcctcgcttatctctgtgttgcagatgatggcttctagccttacccaatcccagtgcagcttgcttgccatccaggagtcgaatttgtttccatctgacattagcgtattaaaaagattggagatcaacaagcaacaatgttcttgtagaaaggtaatcaaggtttagagcctgtgtgtcatgagactcctagcatttgaaaccgctaaggggttgaccaccattgtcccaagcacctgtttaagattctttcctatgataagggacctaaagtgattagcatactgataagattttcctagaataacctatttatttcagtattattctttcaaatcttaattaccatcttttcctttacccagggtcttctttctacctctacgacacatttaattacctatattccccaacctgtaccatattaaattttgaatggaagttttatagggtaatttattggaaggatggccttgagtgtcattatgttcaatgaatgccctattttgacaaagagatgactaaatgttattgaaatctttttaatccaccacgcttctgcttagatgtaaatgcaaatctgttctttacatttgtgattgaattgaacttgaaaagtaccgccatattgattccttctgcaaataaaatataattacatttccctaaactttctacactctcccaagagattggctggctttgtattgtagatttttggtgatcacagaggacaatgcattatcataagaccaataagatttatttttaccttggtaaagaattttaatttatttctagtttcattttcatttatatccatctcttctcaccctctgctctacaaaagtatatatgactatataaattgaaaaaaatatcaagtgcaaaattacagaaataaataattaggttattttagtggaggaaggtttgttgtgggtggaggaggagaggagtgagccaagaaaaacgagggaccatacgtgatcatatttttgcagctattttaaattgtttgtgtatatactttaaaatattataaaataaaattttaagtgcaatgcatatttggagccaatgatgagggataacttcagaaacgtagcatcatcatctagtgctttcatagtcctttcaacatttccagatagttttaatggcctgctcatggaggcaatgccctaattttaacatatctcttcacaactctgatttcttgcttcctaacattaaatgtcttcaaagcttctttcaccactaattccttatcaagaggataagccagtttattctttaagaaaaactagctacacaaaaccgtaagtcattccaacataaatccttcactatcctctctctatagatttggttttgattcctcctgctgaaattcaaccttctttcttcagctatccacacgtcttaccctctaacttccctcaggagtgtctattagctcccattacagtgaccacagtaatatagtaatcccctgctgttctcactctccacttccttacactgcgttttaagtctcttcatattctttatcaccttgtatcatgcatcggttttcttagttgtttattttatgttgccttcataaattccatgagagctcactgccgtatctttagaacatggaacagtgcttggaacataatgggcattccttaaatagctgtagaataaactttcaaaatcaacaataatgtatttgccaaatccattggcttctctgccattttatcttgttcaataccactgcgatattccccttcctttttttttttttttaaagtctgtaaccctttagcttctgtaatattcctagttttttattcctctcatgtgtcaaaatcatcagttgaggcttattgttttctctttctcactctgacctcacctttgtttacatctcatcttctggctttggctatcctgttttttatctctgttccaacctgtatttctagccctactacctggacatgacatgtggatatctccgtatgaccgcagtttccatatgactttgcaaattcatccctgctctcccctccaaagtcatccccacaattgacttcctgttccttccaacctattaaggttcaaacccacttttgctcctcctttgcaggctacacttttccttctcagtacctcttttttttccaagttcttagataaaagtcatagtaccttacgttgtaattgccactggtctggtctttctgcctgctttcctttccatttgtaatcacattatccattccaatccatttataatactgtgatcagccataaaaataacatttatcatatcgtttgtctccttaaaacctgtagtagatcccctctatttacaagatctggtataaaatcacccttcctgatattcaatgcctgttttaatataatctcaatattatgcgtcataaatccccctgtgttcttgcactttttatttcttatacatctcatcaaccatgtcttatcaactctcaaaacctgtattggttttcaggaaaactcataaattattcttttgtagaccttttgtttgtcatctttgaagatctctctctgaactacaatattttgtctgtataatcaatttggaaattcatcaggtattgaaatatgacatgtcttctattgtcttgaacattaattaaaactttatttgactttttatatgcttacatcttgtttcctcacggagtgttaacctactagaaagtaatagtttaatcttatatttattttaattcagatttagtagcatactttacacgtggtaggatgtgtaactgccttacaccttgcttacgtgagttattaatgttttcgtatatttaatctgaggatgtactagcaatgttaaaactgtaccgcatgaaattgagtaattgaactatttgttttaaatgtgttgcttaacttattgtaccattttctcataatcacagctcaagttaactttgtggttgtacgtattatttcttgtgaaatgccaacaaacttagagcaaggaaaataacaggtataatcatactataaaggcaaccttaacactagcatagtctcttagctcatatggtaactacaataatgtacagtgacaaagagaatattgtactttcttagcacacactttcctactactctactgttgtggataaaaacagacatactttaggagaaactatgttatttccaaataatgccttaaaggttactccaggaaaaggcatttacataaactatctaggaaaagaaccttttaaataatataaagagctcacccaaaaggactgaagtgtttagttgaaaaaaagtaaaaatgtcgaagactttgaaaaatagtttcttgcagtatattttcatcgcttccacttacgttatgaagacattaagcgctagtttatcaaaaactatttttgtacatgtcttctaatgacagaacaatgtcaacatgattttcatcattgagaatgcgtaaagaaaccctttgtacagttttttctatgaatgttcccctaagattaaagcaaatttccaacacgaattaggcactccgaaaggaggaggggagggaggggagcaagtgctgcaaaacttcctgttgggtactatgttcactatctgggtgatggaatcaacagaagcccaaacctcagcatcacgcagtatacccttgtaacaaaccaacacatgtacccctgagtctacattaaaaatagagattaaaaaaaggaaatcagtatataatctaataaatacctctcaagctttctcatttttaaaataaaattttagattattattttaggaataaaataggctcttcattgtatataagttcatttctgagttgcaaaaatcctctctttatgtttttttccccgtattagcatgtttttctcctgtttttccccactcaacttggctgccacaatcagaaagcacaaagacaattttttcttgcgcttgtaaatcaaaaccttagcatcagacaaaataactgctccaggtctgtcaaatagattcatttgagctttcttcatgcattgaatacggcagaatttctgacctgaagaaatctagccttttccaaatttgctttaagaacattttgcaataaatttaatataataaaaggaaaaaacacatcaggctagaatttggaaccgattgttattaaaaatctcaagtctatcaatttaacttcaacaaattacttaatttctgtgatggttaatttcatgtgtcaacttggctgggccgcagggtaccgagacatttggtcaaacattattctgggtgtgtttatgaggctgtttctggagagattcacatttgaatcagtagagggagcaaagccgattgttctcccttgtgtgggtgggtctgatccaatcaattgaggacctaagtccaatcgattgaagacctaatcaaaaagcctgattaaaaggaactcctgcctgatagctaaagctggaacacccatcttttcctgcctttgagcttgaattgaaaccttgggtcttcttgagtcttaagcctccagttctggggctggaacttaacgtcattggctttcttggttctcatgcctttggactcagacaggaactacatcattggctttcctgggtctccagcttgctgactgtaaatcttgggacttctccagattcgtaatgagccaatttattacaataagtctctccctctctggtttcgagagagagagagagagagacagagagagaaatgagagcacaagaacgtgagtgtgagagtgccctaatataatttctctaaatatcactggttactcttcaaagttataaaattggtataaaaggtgacctcaatttttcatggagttaatgtatgaaagtcacaattaaaaaggaagaattagttctggtgtcctgaaagttatttgaataaattaatatgctatggaggctttaaaatactatgaaaatttaatattgtattattcttagtgttgctatttttaaatagcactttttcttttcctttttttttttttttttttttttttttgagatggagtctcactctgttgcccaggctggagtgcagtggcatgatctcggctcactgcaagctccactgcccgggttcacgccattctcctgcctcagcctcccaagtagctgggactacaggcggccgccaccacgtccgggtaattttttgtatttttttagtagagacggagtttcaccgtgttagccaggttgttctcgatctcctgacctcatgatccacccaccttggcctcccaaagtgctgggattacaggcatgagccaccatgcccggcttaaatagcactttttcttgtgagtcactttttaaatatttgtgcaaaccttgttgccattctactcaagctaatatcctaaaccgaggacattataacatttcaggagtcaaaacttcagacacttaacatagtatcctcaggttcatccatgttgtcataaatgacaggattttattcttttatatgactcaataatatcccattgcatatatatgcaatattttctttattcatccattattaaacacttaagttgattctatatcttggctattgtgaataatgctgcaataaacatgggaatgcagatatctctatgacatactgattttatttgctttgtctctgtccccagtagtggaattgctgtatcgtatggtagttctatttttaagttttcgaggaacctccataccgtcctccataatggatgtactcatttacattcccaccaacagtgcataagggttcccttttctccatattcttgccaacactttttatcttttgtattttgataatagccattctaactggaatgagatgatatctcattgtggttttgatttgcattttcctgatagtgatgttgaacattttttcatatgttgtattaactaagccaaacacagaaagacaaatgcagcttgttctcattcatatgcacaatctaaaaacatcgatctcatagaagcagtaaatggacggtggtcaccaaagaatgggggaagtaggggaaaagcgagaatggggagaggattgtcaatgggtacaaagtcacgattagaaaggaagaattagttctggtgtcctgttgcatagtatggagactattgtcaacagtaaggtattgcgtatctcaaaacggctagaagagagggttttgaaggtttctaccccaaataaatggtaaatgtttgaggtgatatgctaattttcttgatttgatcaagtaaaggtcttaattgtttggcaattaagactcatgaatacaaataaaggtcttaattatttggcaaagcatgctgagttttgtaaacaattcagtagtgatttttgagaataggtcaatagcaaatattaattaaaatgtcttctatttatgacctacagctagatggtaaacagatagatgatagatagataactgatagataactaatagatgacagataaatgataaatagataaatatagataatcgagagagaatacctttcccttcacacacgtgcatataggcacactccatttctatcatagttaccaggattcagacattttgtctcactatttttctcaatgtgaacatgcatataggaatattatagtttttgttctgtgcccattttagttcgttttttaatatttcaggacaaaggcaatatggcggtttcactttgtttttcatttttgcttatactttttaaagctcagtgtagaaaagtttgaaaatacacaaaagtattaaattaagacagctgggcacagtggctcacgcctgtaatcccagcacttcgggaggccaaggtgggtggatcacgaggtcaagagatcgacaccatcctggccaacatggtgaatcccgtctctactaaaaatacaaaaattagctgagcatggtggtgtgtgcctgtagtcccagctactcgggaggctgaggcaggagaatcgcttgaacccgggaggcagaggttgcagtgagccgggatcacaccactgtattccagcctggtgacagagcgagactctgtctcagaaaaaaaacaaaacaaacaaacaaaaaagcacctatagtctttctcccataggttgccttcttaatgggttttacaccttttgatgttttcttgagttctgtcccattagcaagtagtattgtacaaaaaaaattttatcatcttttatttaatattttattgatgtttaataattagaattattttaaattttatatgtcattttaaaatgcaatacaatatagtaaactcccagatgtgattgtaaataattaattattctcccattattgggcattgggactgcttccacattttggtcactgcagtgaacatccttgtacatgaatctgtatgttgaagttgatttcattccacactccccttcattcaaggggctccaaccattctcgttttctttcagcttctttatatccaggcatataaagttccttcctgactcgggagcgtcatacatgctgttttctccatctggataagtagttaattctgttcttctttgtgcatctcccgtttcagtaacttcatctccaaagcctttccaggtcactttatctaaagttacaccataatcttgcaaatcctcaactattgagcattattagtctccgttatcattattctccattattctctgtgaaagcatcccgtgattttcttttgtccctattaccacaatatgtgtttattccgtgtatgtacatctttgtttgtttattgtttgtctatacctgcaatgaaatgcctaaggtcaggaactgtctgatgcaggatgcaatgcgctcaataaatatttactgaacaaattaattcatttgctcagtcttgcaggcaaatggtacttctgtatatttaaatatctaaaatgaaagcgttactcgttactgttggttgtcaatcaaaatttaaatgtcgatgtttaagcgtgaaagacctctgtcaagttaatctgtacttacccaaaggctattatgtagaagcgacataaatattttcctaaatgttgattttcatattttaagaagacaatgaatgtttcaaagcattttcttctacacagctatttattctggagagtggggcatatgtttcttaatattgttaaaattggcaaggggatactgttgctatatacaaagaacacctaatcatcatgcagacgttttgtttctggctctcagttatgaaaagcagagattttaaaaagttacctttatatgctaaattaggaatggcagaaggtaatattctaatgtttataagtggttcttctctgagtccttggtttctatgtttatgaattctctttttgaaagaaattatagttattattaccaggtctattcttttacattgtttctaattctatggtgatcttcaaaatagagtatcaattttaaatacttgggaatgaaattattcttcccatatcatttctttgtatggcatacattgtgatttgttgtcccatcattgtttcagtatgacctgttactgcaaaaacatattgagataaatcatcccacatactctcggccaggacagacatcacactgttgcagcaacacttcagatgagccccattcaaccttgtgtttttatagagaaggatgccacatgtttatattcatttctgaagattggctcatattatttattgaaacatactagtttaaaaatctgtccatttatataacacctggtctatctacataacttgaattacataaatataaaactaaacttcccctcttctccagtgtatagcttgcaagcaagtgcatgtgaaataaattaaagccttgtttgtgtttttttcatcatgtgagtacaagacttttcaataaaaatgaattacttttgaacatatttgtttggacaacaaacaagagaaaagatctatttgattgatagtggacagaattttcattaagttcaacagcagaaataccacaattgcatcattcaccttcgtgtatcaaaagaaaacagaaaattagatgtgatgaactctacacaaatgttcactatgcatactttacccattaaatacattatcaagaatcatgtcagcatgacattctaatatagcagctttacaaaaacatgtaatctaatctagggatgctgttgtcctctttaaatcagcttcaaacatattctgggttgatatttctcattcttttttgatccacattgtttattcacataatgattatatttaactgaagataacagcattatcaaagtgaaagacaaaatagatgtttaataggaaagtgagtatcgaatcatcttttttctaccaaaaacatctataattatgaagtatttggttaattattttcacaataatttaaaagtgtacaacttgccgatttttttgtactttctacttttcatgtctcgcatatatctctttaatatctaagtatttgagtcagaaaagagccagtaccgaataatgggaatctcactgaaatgtgataacaatctggggcctggtcctgggacctttatctgcaggacaacttggacaaatatttagacccccaattcctcgtctttaccctaggaataataacacatttttctgacctcatacttcacgtggatctcaaatggaacaatcatctgatagcactttatgaagtatatgaaagcaataaattatcacaataagataattgcaattattctttggcatagtattagtgatgtctttatctgtctgacaaaatcaacatttctgtatggtaactgcctttccttgttttaacagaagatcatgccagaaaagatgagtaggtagatacttaacttgttgttcctgaatctggaatgtattgcagatgtcccagactgatctttgttcttttttttccttacaaatttcttttcacattgacagtgtgatatttctttaaatgtgcaatacatagctaaccttatttgtttgtgtttactaattaaaatatctaaactgcttaaaggagaaaattcagttttaagttttattgatttatacccttcttcaatccacataggattagggtagtatgtaacaaaatttcaaactataaatgaaatattgagttttgtattaaggccaaggatgaggaaaaaaaaagtaagtatatatggaaaaagaatggtattgaatgggagttttgatggagcatgttgacatcatgataatacctattatctttatattctgaatgtcagaacaaaattagagcaattttcccttatttccctacaatacgtctgtcttaataattctaagctttcctgatttcagtagtaatctgtattttgcaaaaggcagcatgtttataagatatcaagtaaactaagtttatggaacttgtaacagcatttttaacaacatttctccctagatagttcatggtagacatgaatttattcaaaactagtatgtagaaaaataccattaacaaaagctctgaaattatattagaggagctgaataatgttacttgagaaagaataaaatgttatttatgatttttggtatcttttacccactatatatggccatatctctgaaaaactttagtaatatgtactaatgcaaatatggtagtaaattatgtctacaggtgctgataccatagtagataaagtatgataactttattttaaaatatcatatttaaataattaatatacagtactgggaaagactattttatctattctctcactcttgaataaaaaaatccagaaaaaaataccttgttttggtaagattatatcaatttatttcccaaatgggtagagggttatttttttctgatcataaacgtatgtctcttcattataaaaatccactaaaagtgatagaagaaaaccaaaagaataaatgtaaacaatgatgccattttccaaaaatcaccttcgacatttttctggatattgatacagtctaaatctcttttcggaagactccctcctgtgtaggttccccaactactctgcaatcttatttcctcttgttctgttcttgtagaaaggagacccattgtcaccatgtcaaataacacaaaatggtgcacgtataagatcattgtctctgtccattatttgccagaggacctcaaactttttcaggtggtgggcaactggatgtcatgctgctccttgtacaacagaacacaattcattatttatatggttatttcattttaagaaaatttaactttcattagctggaaaaaaaaagaagtggtttttaagttgtttagaaatgtgaaattcaattttcatactgcaaaagagattcaactgcaaacacaggcacacatgtctggtgtaagaacgagttgtcatacaaacccaaattagctgcctccacgttgtctttgttaacaagtgtttgtttgctccttgttccatcattcagaaatgctctttagcaggaattgatggaacacagtcgcagtgacctcttcctgtctttaaaaatcgagatgacatttgcccatctgcagtgttaacatagttcctcaaagaccactgacagtggggtaggactgtattgcgcaagttctctcatttccctagaatataattggtccagggccagagattttagctcatttagagcagcaaggtgctcttttaaaattccctcacctattttgggcttcatttcccttatacggttatgccttttccagtctgatgaacattctccttgacagagcagacaagcaaaaggagctgcacactgctgctttctgtgtcgtctctatccctaaccttctcccttctgccccaatcagtgaaccttcgtctttctggttcttcttcctccaaatggaagtaaaaaggccctgaatgttgtctttaccattatcacgagcctcaattcattccaagctcagcttttcctcactgtttatacagttctatattgttcttctaatatttgccctcagttctctgtccctcgtttcttcccatgttcatactctattagaatctgagcacctttgaggttgtccatacagtggcacacatctttgttttatactcactgggatgatttgccattatattgtcaaaattttattctaaagagcttttacaggctttcttgagccattttctcttgaaattcaagatcgttgaatctctacgctttttccttcttaatctaataaacatacacccccacatacacacgtgtgttcctgaaagacagatgccacttgactcgtcttatagattgtctaaattgatcattgtgtgtggggataaaagggtgaattgtataatatccctgatggttcacgaagtctgttcctgtataacctgattagtcttctgaactcttttaaattctgtctgcaaatgactgaggtttggcaatcagcctatttcagttagttgttttcttgcataagaagggtccatatgtactgtgtgaagtaagagagagaaagtacttagatttgctggatgccctgattgttagcatggctaaggtattgtgtaagtaaggagagcagttaaaaatgatattgtttttatttcttaattgaggtaaaattttatataagatgaaacagacttatttgggagaggaggaagagtttgttcttacataacatttcaacctgtcatatttagttgagaacttcaatctgtcaagatactttgtataatattcagattctgccatctaatatattttccacgctttcttactgggtgtgacagtaacttatactgtggcaggtgtataagttagtaaagatattaaatgctcaatctgttaacttttgtgaagtggtcccactgataaagtgacacctcaataaaataaaaatttccattacctcagaaagctttttcatgctaccttccagtcaattcccagccccaataggcacctattcttctgatttatatcaccatagattagttttgtctttttaaaaatttgtataaatgaaatcatacaaaatgtactattttgatcagcatactacttttgagattcatccatgtaagtgtatcagctgttcattcctttattgatgattaatattctattgtatagatataccacaatttatttatctattctccttttgatggacattcaggtggttttcagtttttggctgttatgaataagatgctgtggacatttgtgtacaagccatttgtgagcatatgttttcatttagtttgagtaactctgtagaagtggaatggctgggtgaaatgtttaaatttatgagatattgtcaaacagcacctaaacagttttctaaagtggttgtgccattttgcaatgccaccagtgatgatggagagttccagttactctacatctttgtcaatatttggtcttgtcagtcattttaatttttgctatcttacagaatatgtaggtatattgttgtggttttaacttatattcctctgattactagcactattaagcatcttttcatggatttattggacattcatatagattatgtgtgttgaagattattacctttatgattattgggtgaaaatagtatcattttgaggtcattcatataacttgaagactgggaatgacagacattttcctgttttgtttcttttctttttactttatctgaagagtctactagaatgcagtgttgctgcctgagcagcagggcattagctttgtaaaagctctgttccttggcaaccccaccactaatatgaagtgcagaacatttgaattgtctttgaccagcttcagcatcagcactattttttttttttgctagacccctagtaggtatttaaaagtacagaaatagaatttaatcatgctttttaccaaatgtgctatgctcttagagattctttcaacgtgcataaaaattctgcagtttcaccacataccagtaaaagaaactcagtcactcatttagccatttagtaaaaagaacaaattaactgatgagcatagtggagacctcaaaggtaaagaagacaatgtccctgaaataaagacaatcataaattttcaatcaaaataatgaaatttaggctgggcatggtggctcatgcctatgatcctagcactttggaaggctaaggtgggaggattgtttgaggccaggagttcaagaccagcctcagcaaaaaagtgagaccctgtctccacaaaaaaattttaaaaattatctgggtgtggtggtatgcaccggtggtctcagctactcaagaggctgaggtggaggatcaccagagctcaggggttggagactacagtgagctatgattgtaccactgcactcaaacttgcatgacagaatgagtccttgtctctaataataacaaaatttaatttttatagactgtgaaaaaccattatgtagatacagttcaagtacagtatgattttataggatagataacttttgcttgaaaatgtattcccaatttataggatagataacttttgcttgaaaatgtattcacaatagagttagtatttggggcacacctttatccatttaacaaacatgttttgagcactgccaggtagcaacacgttactaggcactagagtgagaaaagattacagttcctgctctcatggatctcatggtctagtcaactggaatgaaaggattacataagtagaggtaaagacacacatgatggaggatggagaatagtcaaaggtctggagaatgaccaggacgtcactgtgagttgtctaattgcactgaagcatggatgaagaattggaaagtcattgtaagaagcctaaaaaggtatctctcagggatgctatgaggttctgaatgttatgtacgctatttgggcttcaacaggcaggcactgagtattcagtataaatttttgagcagggaatccaccagaagaactatgcatctggaggattaatctggaaagattgtgtagaatgttatgcagtgaaagagtctgagatgaaacagttaggagggtgtattaataacataggtgaagtgtaatgaataaccaggctggaggaaaagcaataacgatggaatcaaccgggcaagaagtataacaattaggatcagtaaaatagaatttggattggaggaatgaaaaaaaaagggacaaaacaaagttgaactgctggtatccatactggaaaatacagatgtcattcaaataaataatgtaatgaatataagaaaccagttttaggagtgaagtggatgttggcttgaaaatatttcctttgaggtttcagtcaaatgaaaaggtcctgaaatgctacgtggtagcctaagaaggaagcgttcctagagagaaaaaaattagaaaagatttacatttgataatttaatcttttccttcatacaagctaaattgataagaaagtaaaacctatagttttcaccactcttttacaaatatccctaaccttttagatattcacatgaataattgagaaaaatctaacagatgacttgcttatgtcatttgtctgctttatccttaggttcctctggcttatatattgttcaataaaatacagatcattgatattgtacaatgtactgataatggggagtgaatccatgcttgtgcattcttttttttttttttttttgatttgcagagggcgtgcccagtcaacaagagaggcacaattgtttttatcatcacctcttctcatctaattccatgaaggagagtagtattaccatacaacagataatgagttggaaaacaagaaacctaacctcagaacttaaggcttggggaaaaataaaagagtaatttgtgtttaatgcctgtataacttggcaagagggacatataaggcttagtgatgcccaacatgtgcttagatgtggattgttagttgatgtcttgggggttctgtaatctaagctaaatgctcaaaatcaattaattgatgttagacacagagatctgctttgatccctctttatcgtatttctaggccttcccattctcaagagcctgagaaacgacagctttccttaataacttgttatttgtggtaggagatgaaactttgataaaaacacaattatttttaaatgtctctttttcactctaggctgttgtatgtatttcaaaaagttacttttgaccctttccagaatgagaaagcaatcaagaagattataatatcttgcttagttttctgctcaatttatcaacaaatatttcttaagcaattattaagctgagcagtgctcagcgctgtacttggtgatataggaaatggggaaaagactgtctttaaggcctttataatagtaattacctcaacttgtctgtttcttttccttaccatttcgccaaattcattgatctatcttgttctcaaagcaatcgccatagttatattgtaacacagcattttctagggtgtccccattaagttgagagtgttgacaagaaaatacaagcttatttatcattgtaaaacttgagacacctagtagttaccctaaattaaatatttgttggagtcagtcacactaaagagaacacttactgcattgaacaatttacctacattagacagcatttaaagactatgccacagcaaaggcccatggaattcttgtgaacacagaatagaagtgtattaaggaacaagcttaattctgttctcttaaagcacaacactttctcaaaacatattttgaaatcacctttgaccattttttttaactaataggtgggtgggagttagggtaggaaaacacaagcagcttcatcaaaacgatattctattttcttcaaatttgtggggaatcatacggcctctcaattttctacattatgctaattatgatattaatctctctgccagcaaatgaaaataatacatattagatgtagcaaatgtcaataatgacaaaattagtcatcatgcagatactcagggattcccaaaatatgtttggattatgattgctagctttgagtttgcccagaatcgtttcaataaaaataagggactcaaacacatttggagcaaaactcacatcataaattttagacatagctctgccaataatgctctcagttatattttcagtcctaatatttcctctgagttccagaccagtatcttcaactgtctgattgatactctctccttcatttctgtctccaatgcattaagtcctgtgtatttactttccaaatgccacttggttccatgcacttctctccatttctgccactgactcctcctcaatccaagcgaccatctttcctcactttaactaccatgatatctcctgcttggtctccttacttctattcccgggctcctccaatccattcatcctccagcagagaatgatgactagcaccttccacagtgtctggctaataggaggtatccaatcaataattgacttacagagtgaaaatataggcatggcaaataccagtagagaactacagggttttagaaccaatgacattagatacttccatcaaatatttacagtgtataatcaagttgacttgcacattgtcttatttttgaaaaacaattttgttggctttttctatatgcacacatacatattgtatcaccctctacccgccaaatggcttttgaagaagtatttatgtggctccaaattgataatacctctagagagaagagaaattagaaattttaaaatgacctatgcttcctttcgaatatcacgtcctgagacagtgttttttgagttacgtgcaatatgttccacgatgaaacatttaatgtgttcagaggcatgctagtaatcatgtagaaagaattttatgcctgaagtcacatgttctataaccaggatcacttaataagaaaacaagtacagctgtggacaagatgcctttttatcagggaaaggccaatttgttttctttgcaaatctaagtaaatggagagaaaaacacagcccttaaatgttttctatttgtcctgaagttctcatgaatgagttagaaggcgagaaggattaaataaatccttgaacgtagagagagctaacatttattttagcaaactaaaacctattcgctttgcaaagttctgttctgtactttgtaacaacagttttctttaaaacaagagccaccaattcaaatgcctttacagaatgattgaatgctttcatgccccacctaaaggcattcaaatcattaatcaaacaaagttctaacgccaaaacatgtctgggaccagatttaaaatgtagccctcagtttcagagggcaaaaacttaacatatttatattttcctcactttaggtaacactgtattgaatctctgcttgaaattgaggagcacgtgattttttctttttggcccagggcagcatttcttggaagagaaagaaaaacaacccaagatacccttacaaaacatgtagtacttaaagctctttatgatgaattaattttggtatacacattaatagcagtgataataacaaatctatatatatatatataattgatatgaataagataaatacatcaaaaggaaatttcattacaatttgatattaggtaaatgtcccattaaaataaattgctactgtacataattttccttcagttcattggcaggatgtttgctttggaaaataaacagtctatttctagttttagaaggaattctcattattcttttatagcaaccattatcaggagcagatgggaaattgtaccaagagcatatctactattatacctcacaggaaaaagagagtattaaatgaaatctaacaaggcctgctcctgactctagttcctgtaacaaatgaacacacacatttgtatggtttcagcatttgtattagtaaggtacaataaatgtttactgaaattgaaaaaaaaaaagataacaggagaaagaagaggctaaaaaggtgcattttatttctgatcgttcattgtaaagactgctcctttttaaaataatcaaattttattttatatacagagggtacatgtacaggcttgtcacaggggaatagcgcatgatgctgaggtttggggtacagatctcatcacccaaacagtgagcatagtacctacctgatgagtagtttttcaaccaatgcgcaccctccctccttcccacatctactagtccgcggtatctgttgttcgcatatttacgtccatatatgctctatgtttagctcccacttataagtgagaacatatagtgtttgtttttcctgttcctgcgttaatttgcttatgattatggcctccaactgcatccgtgcttccgcaaaggacatgatttcattctttttatgactatgtagtatttcatggtgtatatgtaccacattttctttatccaatctaccattgtttcacaactagatggattccatgtctttgctattgtgaatagcacaagacaggacctttttatttgactgagttccttgcaaattactaataaaagatctggaggtccttagttaaaagttgaatctgtagtgccgttcaaatttagagatgtattttctgttcaagagaagaaagccctcattcggtcatgcttaatattcagctgtaaagtccaaaacatatgagaatgacacaaatggaaacattttataaatacctatacaaaggaggggcacttagttcccctaggcctcttaaaagtcctctagaaagagggtacttttatgctaactattaaagatgagtaacgaatttgtcctatacaacttaacagtatcgtcaaggaagtagaaagttactcagttttactgggcattggagctaagcttgaaagtgaggaggagaagcggcaggagacggagccgagaaggcagtggggagaagaggaggatggtcctttccatgctccctgttgtactaacatgtttggatattatcttatacttcatatatggactggattcttgtccttctcattctgagctctccttgaccttgattcttacctcctataactttcattctttctttactcaaaaaaaggccatttatttcagccatttttcactgttttcttatccttcctagttgcttttctatactatttttccactcttttttttttctatactattttgcccttctctccattttcctaactgctagatttccccaattttagccatctttcaattgttctgactatcctcaggtgctcccacaaggttatcagaccttccaccaagacggaatccctcagtctatggacaggctaagttgaatgggtcctggtgctgtgcttagcatatgccttgagtatttgtgcatttattttgcttctttacaaaaatccatcatccgatagaagttgaaagaaacttgctgaagcacattaaaatctctgaaaacagtattggctatattttctaataattagcatgactggttaacttgctttatttatcattgaaaaaagtatcagaaactgtatatcaaactcctgaattcttggcactgacgaagagacacaatgagaatgaccttaggataaaaaaacaagataaagcaccatatttgtaggaaattgcaccataaaagtctgtttcacaactctcccaaatttcattttattacatcttttctcttgaccaatcagtaaactcggttaatgatttacctgtctcaaaataattcatgaacaaaattacaagtaaatctcagtattggattcttgaaacatctccttgttcaatgaagtttcctttttcttccctctatttccctgtatttatcttttcttccagttgcattttatctcttctgtttttttatcttgctccctagtttgtgattttttgccaattttttatttcctacataattcatccaatctgtcattgtacaatttcttataactgcttcttagcttattccttttcttcatttgtcacattctatttttcatctattgtgttttcatgcagttttggaaagttttacaaatagacttttaaaaaaatgtacgtaatgttttcatagaaaaggtagtggtttctttttcttatatccttccctgtataaaaataaaaatgtagcagttctttctttgcctatgtttcctctttccttcccccaatttgaccagacttgaaggacttagatatgtaacagtgttattttctataatttaggaacagcttttgacttaaaaagcagaagagaagttgaaaataatatagtaattctacatgtccttcctgcttcccaactctctgcacatgtttgtaacctcccctttcttttttagtgtatctctttcatatacctttgtccccagaaattctgattcagtagacttagaatggaattctgggcttttatattttgaaaagctccccacgggagttagatatgcacttcttattaagaatgaatgcttaatattggaatcaaaacacaataagctttctaactatgatgaataatccaacagatttaattatgattttctttttgtccagaaccaagactagatgttaattgccagagaaatagataagaatgcctatgacagcagtacattaatatgatatcaaagcttggaaattttattggtaatgaataattcagtacttaaaatatttagaagctatagaattaaaattaattaatgttgttcactgtgtgaataaagttgattgagattttacatttaattttgtaaacccagtgttatcttttccagctcagaaaacaccacatacaagctactactttctgttttgatcccttatttttctttcttatgctttatcactgaaaactctccttgagcaggccatgcactgtaaatatttctcctggttgcaaaaccttctcatacaaatgcagtagactgtgtaatgagctcttctttcacaaaattaaaaaaacctgaaagccctgatttgcgattctatacaaatgagatttagatctaacaattttaaattattgcttcactcttagctgttcaattctatctcttatttgggaaaccgaaataataaaaccattgctgattccacaattaggttgtaaaagtcaccgtagccatcagccatgaagcaaaagtgccaagatcaaaactacaaagcaaagaggctgagataaaaatgctgcagcattagtttatagcattataagcagcaataagaattccttgattgcttaacaaagactcaaaaggcatttactccattaccttacaactcaaagaggtattcctggaccagcagtattggcatttttttgaagtttgtaggaaatgcagaattttggtgcctccacggacctaatgcagcagaacttgcagtttagtaagatctccaggagatttgtatgcgcattaaagtctaggaagcaccgctatggtatacatctgatgtgtgcccatgcattttttaaaagtatgaagtaatagttgtaagtattggacactcttgaaggaacaaataagagccatggtctttactctctaaatacctccctgacatctatgttttaggcaaaatttttttcccatttcagtagtcactgatgcttgcacgatgcagtttattccaaaacaatggtgattctcatgtaatagttcatgttgccttaataatttacgttgcctcaagttctctgcccaggccccaatatacaccgagggctgtactcctcccctaacgcctgctctcatacagtggcatagagcccagttttatgctcttggtcacatcatggagattgcacaccacaggctttaacttctgccgtactctcactgcctctaaccctccatatgcctaagttctacgattctttaaattccaaattgacccagaagtctcctccgctcatccttttcactgagatcatccctcttctggcctaccatttgttgatcaccttgctttttttttatcctactgtatgtagtataacaaattatcacttgcaactgtgtcttattttttcaactagattatgtactgcctaagacctagaaaattgtgcttatttatttgaatctctaggaggatcagtaatgggtattaatactaatgactccatggtgatgatgagcctgaacttcctcccttcctttctttctacctctctcctttcctcccttcttttcttcctccattccttcctctcttcctccctccgcttcttccccacttcccttattcatagattcatgcgttcactcagcaaatgcttactgaaaccttccatgcatcagacattgtactaaacaataggaaactatcatgaataagacacaatatctgacctcaaagaatttatgatataaaagtaatggcataaaccgtgattacttttgcaccaacctaatatatagacacagtttgttatgactggtgtctctattactaagcaatgactgtcacatgcaacgctgatctgaacaggtggtaaagagtgagatgtaagcaatggagcaaagccaactagttacaaggaaatatcacatgtttactagagcacatctcatgggcattcaagagagtatggccaggacagcttgtgaatagttcagtaactgtgcatagttttatattcattgtgaggcaccgtgtcaccggtttgctgatttacagagtattttaattgctaactgtatgctaccaaaatttccagtattcgaaaataattttgcttgaatgtagaaaaagaaaaaagccaagaaatgtatgtgaaacgagagtctaagggagctttacctcagtctcagaaaacatgcattccttccttcatttaggaagcatgtactggggtctactgtcagcttgctattgtgtcaaggagtaggagaatacaaaaatattagagaatatgaatcacatctattaggagagttttctacatacgcacattattctgtcagtgacataaggatttgagtcattcagatttaaatacggtaggtacctcaagttctcagatattatttcattttctaaggttcgtatttagttaatatgttattttaatggccttacaaattctagattatcttttttaaaaagttaaatagaacgtaattgccatttttatttaatggtaaaaagcatttttgtttttgtgtgtacttggttgtaatattctccttttcaattgagctatttttctgatactttactcttaaaatttcattcaggaaaaaagtaaacaatatttaagcttgacaatcataaaaatgctctggtgactatagattattttaaaatttattactgtagcttagggatatcttgatgggatgctcctgaaagcaattaattctcagttttttgtggcttctaatgcaaaatacattgacgcagacagaatttgaaatgaattttcttctaatatagcaattaattttatttaaatatctctagagtttttttttaatactgtgactaacctatgtttgttctttttcacctctcgtatccacgatcactaagaaacccaaatactttgttcatgtttaaattttacaacatttcatagactattaaacatggaacatccttgtggggacaagaaatcgaatttgctcttgaaaaggtttccaactaattgatttgtaggacattataacatcctctagctgacaagcttacaaaaataaaaactggagctaaccgagagggtgcttttttccctgacacataaaaggtgtctttctgtcttgtatcctttggatatgggcatgtcagtttcatagggaaattttcacatggagcttttgtatttctttctttgccagtacaactgcatgtggtagcacactgtttaatcttttctcaaataaaaagacatggggcttcatttttgttttgcctttttggtatcttacag

SEQ ID NO: 157 - DNA, 20 bp, Artificial Sequence
  Synthetic
ggggctccaccctcacgagt

SEQ ID NO: 158 - DNA, 20 bp, Artificial Sequence
  Synthetic
gcacaaaagtcaaatcggaa

SEQ ID NO: 159 - DNA, 20 bp, Artificial Sequence
  Synthetic
gatttcaatataagattcgg

SEQ ID NO: 160 - DNA, 21 bp, Artificial Sequence
  Synthetic
gtgagggctccaccctcacga

SEQ ID NO: 161 - DNA, 21 bp, Artificial Sequence
  Synthetic
gaaggattgagggctccaccc

SEQ ID NO: 162 - DNA, 21 bp, Artificial Sequence
  Synthetic
ggctccaccctcacgagtggg

SEQ ID NO: 163 - DNA, 21 bp, Artificial Sequence
  Synthetic
gtgagggctccaccctcacga

SEQ ID NO: 164 - DNA, 19 bp, Artificial Sequence
  Synthetic
gggctccaccctcacgagt

SEQ ID NO: 165 - DNA, 19 bp, Artificial Sequence
  Synthetic
cacaaaagtcaaatcggaa

SEQ ID NO: 166 - DNA, 19 bp, Artificial Sequence
  Synthetic
atttcaatataagattcgg

SEQ ID NO: 167 - DNA, 20 bp, Artificial Sequence
  Synthetic
tgagggctccaccctcacga

SEQ ID NO: 168 - DNA, 20 bp, Artificial Sequence
  Synthetic
aaggattgagggctccaccc

SEQ ID NO: 169 - DNA, 20 bp, Artificial Sequence
  Synthetic
gctccaccctcacgagtggg

SEQ ID NO: 170 - DNA, 20 bp, Artificial Sequence
  Synthetic
tgagggctccaccctcacga

SEQ ID NO: 171 - RNA, 20 nt, Artificial Sequence
  Synthetic
ggggcuccacccucacgagu

SEQ ID NO: 172 - RNA, 20 nt, Artificial Sequence
  Synthetic
gcacaaaagucaaaucggaa

SEQ ID NO: 173 - RNA, 20 nt, Artificial Sequence
  Synthetic
gauuucaauauaagauucgg

SEQ ID NO: 174 - RNA, 21 nt, Artificial Sequence
  Synthetic
gugagggcuccacccucacga

SEQ ID NO: 175 - RNA, 21 nt, Artificial Sequence
  Synthetic
gaaggauugagggcuccaccc

SEQ ID NO: 176 - RNA, 21 nt, Artificial Sequence
  Synthetic
ggcuccacccucacgaguggg

SEQ ID NO: 177 - RNA, 21 nt, Artificial Sequence
  Synthetic
gugagggcuccacccucacga

SEQ ID NO: 178 - RNA, 19 nt, Artificial Sequence
  Synthetic
gggcuccacccucacgagu

SEQ ID NO: 179 - RNA, 19 nt, Artificial Sequence
  Synthetic
cacaaaagucaaaucggaa

SEQ ID NO: 180 - RNA, 19 nt, Artificial Sequence
  Synthetic
auuucaauauaagauucgg

SEQ ID NO: 181 - RNA, 20 nt, Artificial Sequence
  Synthetic
ugagggcuccacccucacga

SEQ ID NO: 182 - RNA, 20 nt, Artificial Sequence
  Synthetic
aaggauugagggcuccaccc

SEQ ID NO: 183 - RNA, 20 nt, Artificial Sequence
  Synthetic
gcuccacccucacgaguggg

SEQ ID NO: 184 - RNA, 20 nt, Artificial Sequence
  Synthetic
ugagggcuccacccucacga
